United States Patent Application Publication US 2022/0008368 A1 - sequence listing, part 10

SEQ ID NO: 2 - DNA, 58617616 bp, Homo sapiens (residues 19,539,208-21,710,230 of 58,617,616)
  modified_base (1)..(60000): a, c, t, g, unknown or other
  modified_base (24448981)..(24498980): a, c, t, g, unknown or other
  modified_base (24552653)..(24552752): a, c, t, g, unknown or other
  modified_base (24891257)..(24891356): a, c, t, g, unknown or other
  modified_base (24895791)..(24895890): a, c, t, g, unknown or other
  modified_base (24898314)..(24904771): a, c, t, g, unknown or other
  modified_base (24908590)..(24908689): a, c, t, g, unknown or other
  modified_base (27190875)..(27240874): a, c, t, g, unknown or other
  modified_base (58607617)..(58617616): a, c, t, g, unknown or other
cagcccttggggctagagctgggttctggcctctcagagcctcaattttccctcctgttaaaatggggatcatgggccaagcacggtggctcacgcctgtaatcccagcactttgggaggccgaggcgggcggactacctgaggtcaggagtttgagaccaacctggccaacatggtgaaaccccgtctctactaaaaatataaaaattagctaggcctggtggagcgtgcctgtaatcccagctactcaggaggctgaggtgtgagaatcacttgaacccaggaggcagaggctgcagtgagccgagatcgtgccactgcactccagcctgggtgacagagggagattccgtctcaaaaaaaaaaaaaaaaaggggggggatgatcgtggctgcaccttgcctaaaaggaggctcccagcggtccccatcagtagcagcgtgcttccttctccccactcctcacccacagacgccacccccaccgaggagccaatggcgactgcactgggcctggaaagacggtccgtgtacaccggccagccctcaccagccctggaggactgggaaggtgagttagcctgcctcggagtcccgtctctgctgcgggcttgttgggggtggggcttgggctactggggtcgtgtgaggagagggcacacactagacgaagggcccggcgccgtcctggtccccggacatgacagcccctggaggtgatgccccaagttcaagatctaagtgagaggccggtcagacagaggcaagagctcagcgcaccgggatggaccaggtcaggccctgggcggcagaactggggtcgcggggaacccagtctgccctgcacctgtttcaggccgctggctcgggtcgtgggcgcgctcggctagccggtgcccaccgggggagggggctgagacagcaagtaaggcctttgcacgcatgcatgggggcctacaggccgccgccctggtcccagcgcgtgcggtgcccgcagaggccagcgagtggacgtcctggttcaacgtggaccaccccggaggcgacggcgacttcgagagcctggctgccatccgcttctactacgggccagcgcgcgtgtgcccgcgaccgctggcgctggaagcgcgcaccacggactgggccctgccgtccgccgtcggcgagcgcgtgcacttgaaccccacgcgcggcttctggtgcctcaaccgcgagcaaccgcgtggccgccgctgctccaactaccacgtgcgcttccgctgcccactaggtgagggcggggctggatgacgggggcggggctttgaatgggcggggctggcgaacgccgggaagagtcgtggtgggtggggctgggaggggcaggaccgtgtgggtgtgggcgtggctgggaagagccgggggacccttaggcgtaggacgacgtcagggggcggggccaggcagggcggggcttttgaagagaggcgctgggaacagcgcggggcccaagtgcaccgtcaggaggcccagcgggtcaggacccatgtccggccccctggaacgcatctccctcccgctgccctcatttgagcatctgtaagagctcagttctgtggagtgtcttgagcccaaatgcgtgcaggatgcagggagaaaagcaggactgatccccgggaccttatgcgggggtggggaggtgggtcggtacctaaactatgtcttcgacaggcgcgcctaggggagcatgggtgggggcgatggcagatctgctctctggagtgtccgcccttggatgcacatatgtgagggggttggggaagaagggtcctttagtcccaggttacccggaggcgcagttcctggggagggcggccacctgatctccgtccctgccttccgcagaagcctcgtggggcgcgtggggcccgtggggtccctgctcggggagctgtgggccaggccgtcgcttgcgccgccgccactgcccaagccccgctggggatgcgtgtcccgggcgtcctctggaggcgcagaagtgcgtgcggcctcggtgtccaggtaggaggggcggggtctggaggctgggacctgtacagaggggaggaaggggaggttaggggctgagcctgggagagagggtggagttagaggcggtgcctggatgtagagaggcagtgcttctcctgagcgatgcctagaggggaggagctagttgggggcggggcctcgtggacggggctgtgaagggcggggcctggtgcgggggcggagcctggaggacccaaactctggagccaggtggagaccagcccttccttccctcctgggcccaaggagcactggtaactatgcacatctggacaggtggatgccagggggctcttgtgcaggcagacatgggcagataggagggggtgcttcccctgtgtgcattccagactgtacagatgtcttcgtggggaaacagaattcagttcatgcactcagggtgcacacgtgcatggcatttgcagcccccaccccggtcccccacgcccacacagacacccgctcacagcctggcagacatgatgcctaggccctcccagggccagacaccgggcaagccaggaggagactggaaattccgctagcgcctgggctccacaaacacggcctggaggctgctccggggagcccgtcacagggtgggggcacatggtggccaatggggcgttggggtccccaccccatcgcgcctggctctgctctcccggtgcctgtgccctgaagtttccagtggaattttccattttatggagaaaccgcaggattgggaaggggggcagttgttctcagcccaagatccagccccttactgggcccccagcccctgtccagacattttctcttctgctggaaagggcagtgccatattttgagacttacctctcctgtcccctcctataggacctcttccctacgtctctggatcccagttcctatgccctggcccagtcctgaccacttagcccatctccccttcacactagggactgctccaagcagggccatgctgaggcctctgagaggcaccttatgggggggccccaggcatatttgttgagtgactgattgaatggaaagccctcctcaggagggagtgtgaaggtttctctgtcctgcttcctctccatatccccccagggtgcagccttgacacctgtgaatgcccggaccacatcctcctgggctcggtggtcaccccatctgggcaaccactgctaggagccagggtctccctgcgagaccagcctggcactgtggccaccagcgatgctcacggaaccttccgggtgcctggtgtctgtgctgacagccgcgccaacatcagggcccagatggatggcttctctgcaggggaggcccaggcccaggccaacggatccatctctgtggtcaccatcatccttgataagttgggtaagcacccttgcaacatggggcatgaaggggctgaggatctggggaggaagttctagcactcgatcaagagaggaagaaatgagatgtgacacagtcattggcgaaggcacagagtgagtcggcatttctgggagaaaggagaggatggggacgttgctcctaggaagggtgggtgggagaagctctgatctttaccacctttgaccccagagaagccgtacctggtgaaacaccctgagtcccgagtgcgagaggctggccagaatgtgactttctgctgcaaagcctccgggacccccatgcccaagaaatactcctggtgagcgcccgccccgggctcaggggcatcttctgtggctttggggttagattcaatttcatgttgttatgtggtttcccatctggagagtggggaaagcgttaacggggaatgaattgggtgggagagggactaccaaggaggctgaatggggccagtcttgctggggaggaggctgactttggcaaagcctctctgcagctccccagcctgcagactgggggcaacacagcccctcccactgagtcctatggtgtcgctcacctgccatccaggttccacaatgggaccctgctggacaggcgagctcatgggtacggggcccacctggagctgcggggactgcgcccagaccaggctggcatctaccactgcaaggcatggaatgaggcgggtgccgtgcgctcgggcactgcccggctcactgtacttggtgagtgtccttggccacagccccgagcaagccttcacccaaacggaacccggactgtagctaagctcaaccccaaatggagcccccacttcagactgatccaatcctaggcctccactgagcccccataccactctgagcaccaaccttcagtccttaccctgggcagacccctgtcccttaggtggagtccttgactgcagacagagtccccagccttggcctccatgaagtcctcctccctgccctgacctgcatgttttctttgtccccagccccaggccagccagcctgcgacccccggccccgagagtacctgatcaagctccctgaggactgtggtcagccaggtagtggccctgcctacctggatgtgggcctctgtcccgacacccgctgccccagcctggcaggctccagcccccgctgcggggacgccagctcccgctgctgctctgtgcgccgtctggagagaagggagattcactgccctggctacgtcctcccagtgaaggtggtggcagagtgtggctgccagaagtgtctgccccctcgggggctggtccggggccgtgttgtggctgctgactccggggagccgctacgcttcgccaggattctgctgggccaggagcccatcggcttcaccgcctaccagggcgactttaccattgaggtgccgccctccacccagcggctggtggtgacttttgtggaccccagcggtgagttcatggacgctgtccgggtcttgccttttgatcctcgaggtgccggcgtgtaccacgaggtcaaggccatgcggaagaaagccccggtcattttacataccagccagagcaacacgatccccctgggcgagctggaagatgaggcgcccctgggcgagctggtcctgccttctggcgctttccgcagagccgacggcaaaccctactcggggcctgtggaggcccgggtgacgttcgtggacccccgagacctcacctcggcggcgtctgcccccagtgacctgcgcttcgtggacagcgacggcgagctggctccactgcgcacctacggcatgttctccgtggacctccgtgcgcccggctccgcggagcagctgcaggtggggccggtggccgtgcgggtggccgccagccagatccacatgccaggccacgtggaggccctcaagctgtggtcgctgaaccccgagaccggcttgtgggaggaggagagcggcttccggcgcgaggggtcctcgggcccccgggtgcgccgggaggagcgcgtcttcctggtgggcaacgtggagatccgggagcggcgcctgttcaatctggacgtgcctgagcgccgccgctgcttcgtgaaggtgcgcgcctacgccaacgacaagttcacccccagcgagcaggtggagggcgtggtggtcacgctggtcaatctggagcccgcccccggcttctccgccaacccccgtgcctggggccgctttgacagcgcggtcaccggccccaatggcgcctgcctccccgccttctgcgacgccgacaggccagacgcctacaccgccctggtcaccgccaccctgggcggcgaggagctggagccggccccttccttgccccgcccactcccggccaccgtgggcgtcacccagccctacctggacaggctggggtaccgtcggacggaccacgacgatcccgccttcaagcgtaacggcttccgcatcaacctcgccaagcccaggccaggtgaccccgccgaggccaatgggcctgtgtacccgtggcgcagcctgcgggaatgccagggggccccggtgactgccagccacttccgcttcgccagggtggaggcggacaagtacgagtacaacgtggtccccttccgagagggcacacctgcctcctggactggcgatctcctggcctggtggcccaacccgcaggagttccgggcctgcttcctcaaggtgaagatccagggtccccaggagtatatggtccgctcccacaacgcagggggcagccacccacgcacccgcggccagctctacggacttcgggatgcccggagtgtgcgagaccccgagcgtccgggcacctcggcagcctgcgtggagttcaagtgcagcgggatgctgttcgaccagcggcaggtggacaggacgctggtgaccattatgccccagggcagctgccggcgcgtggccgtcaacggactccttcgggattacctgacccggcaccccccaccggtgcccgcggaggacccagctgccttctccatgctggcccccctagaccctctgggccacaactatggcgtctacactgtcactgaccagagcccacgcttggccaaggagatcgccattggccgctgctttgatggttcctctgacggcttctccagagagatgaaggctgatgccggcacagccgtcaccttccagtgccgggagccaccggccggacgacccagcctcttccagaggctgctggagtccccggcgacagcacttggtgacatccgcagggagatgagcgaggcggcgcaggcacaggcccgggcctcaggtcccctccgcacccgccggggtagggtccggcagtgacctgggcaggggcctcgctttcccacctccctccagactcctttgaccccaggaagttttgcccctccttcttctccagacagccccctccccaggtgtctgggtcccctttcccgcccctttccagaactcagagtcagacaagaacccagagcatccgatggtagaaacaccaggaagacaattgttgctgtgtggtatggaatggagtttgcggtgactctggggccagcacccaggggacgacgttcaaccctagcctgaagggacccgctcccagctcagaagccgtctctgacttctcgtgcgtattttgaccctgatttcaatcttctacccttgggagttctggcgtttggcacaaagtcccctctgcctgtttggagctcagtgctagaccaggtcccctgccccgagctttgtttttggggttatttattgaaacaaagtgtggggagctggttgtgggtgtgagtgggggtgtggggtccaggctgggcccagtgaaaaggaggaaggggttcccatgcgggggaggctctggggctgaggggaacaattctcacgtgtttggtgcttagagacctgcccggggcgttgggcaggccctccgggggctgaattaaaaatgctttatttccaactcatggtgtcaggctctagggaggaaggatggaggctggggctgcccggcccagatacacctttcaggcagaaacacgcggaggcacacgcgggtgccgggggcaagaagcacgggcggctgtgaccgctgaacacagtggcagcctgctgctctggcctggactccttggctgtgcctggccgtatgccccggggctacagcaggcagggaggggccctggcaggggagcctctggggcaggcaacagcaagccaggccaccctggacctcctcagtcgagtccacagcagccccaccctgggccccacccacctgaaccccggccacacctcggtcatgtggcgacggggctgcccgaggccagggctttctgaccttgccaggaccctgggtctggaggcggcagaatcacggctggctggcagtctgtgtgcacgtgtgtcctcctggcgctccacagggccggcgctgtcctgaccacacccccactgtccagacagaaaaactgaagtcctggggtctggcatgaatcccagcaggtttgagccccctatagctctaggtgtgtgattccccagggtctggggatgaaggcatcaatgtggcaagactggagtggcctccagggcacctgggatgggagacttgtccctggctgacaccccctagggagtgggggtatggagcgtcccttagcttagggggcaaccacccacttcctcttcaatctcccacccattcactggctcccctctccagacccccgatctcatcattcacccatccagcatttagaggtgtgagctctgcactagcaacttcaggggacctgagagagcctatctctctagggggagacaggctcacacgtgcataccccaatatgccctgggccagtgctccacccagagggtccctggctcttgtccactggccacatccccccttcggctgaggtcttggcaaatccgaacctccgcagctctcaccctttcagtcagggaaacacttcctttgccctagggtggacttgggggcctggaggcatgggagaagcccaagatgcgaggcgtcacccctggtctctgaaggtgggccctaagggctctgctggagtttgggtttgggcagccccagacattggcaccccagcctcaccctcgataggctgtgacaggcaagagaggcgagaggtccctgagggagctggcagggcttgggagaacacacatttatccagaacttactgtctctatacccccagctgataggctcagaggcacaggcccctcccaaggcaacctaggttcccggcctgcctgccacagaaccctgctcagggctgcctggtgggggtcctggggaggggtgggaatgggggcgctcccacttgaagcgggcaaagctggctgcagctttccaggcggagggtgatgaggtgtcaggctccacggccaaatacctttcattgagaaagtgttggggcctccgacgctgccaggctagggcggccagccaggcatggagcgggcagctggcccagccctgtccccttccctagggtggggcaggggtggacgggcatcctccagaagccccctccccagtcaccacgcctgggccaggaagggcatctcaggaggaggacatggctgaagcaaaagctgggcagggcacggggctagagtccagctcctccccatccctgctgataactctgcaagagggcagcgtttggccacaatttccagatgaggaaactgaggctccaagagaaggacgccatcaacctgagtcaacagccttgtgcctcttgacactgcctgtctcccccaactgcagccctcaagccaggaatcccaccccctccctcctggaacctgggctaccgtccgcctcctggtaaatccattgtctaccccccaaccaaattggggctgccagaccacaccccctcagtctgggaggagtgaggggcaggggaccccctcgaagagacccccagctgcagccaccctgggtcagctcagggcacaaacaggcccttggtcccgcccacggcattttagacttttataattttagaaccaggggttcttaaaattcctagcaccatgatggggaaaaaatcttggaacagtaaaatgtttaaaacaagagtcttcaaaccacagaatccaagaggagggagataaaaatgaacacacattgagcgttgactgactgtaagccctccgagccagcccccgcaaagcctaactcactttaagggcatttagtataaatctgttgccttgggatccccaaaatatgcttttagggaggatgatttttacccccattccacagctggaggaatcttctcagggtcacacagcaaatggggtactgtgggctggggaagggcaatgtttcctggagaaggggacataagcactgggtcttgaaggatgtgtaggagtttgctgggtggccaaggcaggaagggcataccagggagctggaaaggtgaacgtgaaagctggaggagggagacccacggagggcggcagtagaagggagacacaaagtggaggtgagcaggggctcgaatgctgagtgaggagcctgagttctctggtgagcaatagggagctatgggttgtgctgaagcaggagaaggttacacaatatctcgtgacaaagactcccctggagctggtgcaggactcagcttcttacaacatgcttctttcacggaactggggtctgctccctcctacttgggggcccttccagggtccaaaccctgcagcccagcgccctctccccgccagctgcctcctgtcctggctgaacatccctggctcctccattggggcctcgtggacctggcgtggccacccaccacttccctagccccgtctgtctctctcatcagccctcagagttgggtctgacccagcctcagaccccaaagactggagccagcctggcggggagacctggctttggtcaggtgggggaagtgcttgtgctttaatggtggaaacaaaggcaggatgccacagggtgagagcagaccaggagaatgccatgtcccgatgcctcagccctcccagggcaggagctaagtctagacccctgggccgagggtggagggggtctgggcaggcaggagggaggagaccccggccatcggggaatcagcagaccctgaggtttggaggtggatgcagggaaacaaacactaccctaggcagggcgagtgtgtcacacagagccagacacgcctgtcatcgatctcgaggtcacgctgccctcgtcacgccccatccctgtcccctgtagtcaggggcatgactccctccttcccatacttcctagccaacttctcgtcacctgattggtgacactgtcaccctcaggacagccacataggcagttgcactcgaaaagagcatgagcccagacacaccagacccatgggacacgctggacactgtcccccctcatcacagcagcacgggtagacagatgcaccctcaacacagagaaaggcccacgcttagggtcaggtagcggtgcctgcagctgcgtgcacctgtgcatacctgtgcacacctgtgcgcacctgtgcccagctcccctttgactcacccatcatcaccccacacatcgggacacacttgacccccagactcccagctggccagtctcaaccccccacgaccctccacaactcagccccaccaggcacatgaagccatgccgagcacaggcagcacctcccactctctcggggccctggggagcgggtcggccctggggctggggactggcgggaggcctcaaggtcccagccacttttccagggaagtcctgaatcccttcctgctgactcagccctgggggctggctaggctgggggctgccaaacctcaggtatgtccttgaaggctgcctggcggggcctctgaggtgggggcgggggctcccactcgggactcagtccttccctgggccccagcctccctccttgccccagatggagctgcagctttaaccgtggcgttcagggcatggggccagcacgatggagcctgaggccggctgctcccaccccagttcctcccggctgagggttggtggaagaataagctcccagcccagccagagtatcccagcctgactgtggcctcataaagacagcactgtctggtgggaggtggcctggctgcccatcctggggcccagcacagggacccatgcacacacagtgggcacacacgtacccatgtgatggctacatgcagacctgtggatacagatgtgcatcatcagacacaaactcagcaccaggactggcccccacagaaccccagtcaggagggggaggcagcactggccacagatactccagtctgcagggccaaggttggccagcccaaaggccaggggctgggaaaacccagaggagggcccagggaaggctttctggaagagagggcattttgacttgggctttgaagggtgagtaggagtttaccaaaccaagctcagatgtccaaaagtcttaatgctggttttgaggtttaccttttgtctgtgaggatgttgggcaggggagggagacagacaaaccccaattcactacctccttttgaggacccagcctctgccctcagggagcttccagtcagataggggaggcagcactgactcagccaggagggatagaagatacttcagctgtgtgaagcacctgtcgtgtgttgggttggatcctgtcaaaaacccatagggaaaattctattatgatccccattttacagctgagaaaactgaggctgagagcgggacataccttgctcagggcccacagggaagcagagctgttcacacacagccctggttgctgacgtgcaattgtggctgctgacctggtcccaaaccaactcaaaagtttgcgggccagaatggtgcagctcaaagaagtctgcgttggcaaaagttgcatctttgcacctggaatcctggccaggccgggaggcccctcctcccgggacatacaagatccccctgggacttctcagcgagatcatcccctgtcctttgttatctggctgctgagtggctttcacggggcaggggcttctaggcagagggatgttggagtgagggcctgggggtgcttcgccaggacttctgggaggcctgggtccccagcctcggccccgcttgccatctggcccagctgaacacaaacacttggacatggccgacccaacggaatctgggttgtggtcaggccgtggctgaaaaagccactggaaaaacacgcagcccacggggccaggcccagcttacgtttcaccagggaggagtggcctgctcggcgcccagagccgaggaatgtccgttctctaaccctttggaacttgttgtctgactggggaatccagcagctgggcggtgccatccttagtgccctctggtcaggctgtgacttacctcctgctgtgttcttggagactcaggcctcttggcgtggccccctggcccagcccctggccagccactgctgaagaccccttgtcagcttgcacacccctgaagacagagggctcactcccttccagctgtcatgccaggcagccggaagcctgttaactaggctgattttttttttttgagacagattcttgctttgtcgcccaggctggagtgcagtggcacgatctcggctcactgcaagctccgaactaggctgattttttatgggaaattcgggcttccttggccacacagatgggaggtcagtgcagcctgggcactccctcctttccctggggttccacctccttctggatctccggatgtcccctcaggcccctaggatcagcaggtcccagtggaccccagtatctcactgcgaaacgtgttcctcaccctgcagccatgtctcagggttatccatctgtctgtctgccctgcgccgcgggcagggctggtggcccacacatccactgagtgcccactggatgcggaagcacctcacttgcatctcctcactgacctctcccggggaggctggtcccattagtgctccactttgcgggggagggccgggggggcggtgtggggaaacagaagctcagggggtttcttttacgtcctgaagatgtggtggcagattctggaagtaggagccagttccccactggctccaggacaagggcctgggaaacctcgtttgtcaggccgggacaacgcctggtggccaaagggggagctgcagcctgggccatgggggtgcctgctgcagtgtccctagcttaaggctggcttgggttacttctctgctcaaacaccctccatggctcccgtagtctcctcagcgggcacaggggtgctagatgagcccctcctgggtcattacagagactcctgactgcaaaatcttgcctcttgggtcagacctaagccctgtcctcactcaacctcacagcctgtttccccagctggggaataaaccaacaatggcctttgcctcttcaggaactggtgactgcaaggctggcatgggttaggcgctctgtaattgcaattgtcaccctcagtaacgcacaggagaggggcagggacttgagctggggtgtcccaggcagcctcaaccaccctccctcagcaatcgctacccgcccccccgcccaggacaaggcatctgaatcagggcctcaatttcctccccagagtgtgggggcctccaaactttatcgagggtcctagtgtgttaggtcttgaaatgccccctggagtcgtaggggaacagaaatgttcactagggagtgggtatagggccttgccaagcactgatgaaggggccctagaaacttccatctttttttttttgagacagagtctggctctgtcacccaggctggagtgcagtggtgcaatctcggctcactgcaacctccacctcccgggttcaagttattctcctgcctcagcctctcgagtagctgggattacaggtgggcaccaccatgcccagctattttttgtattttagtagggcttcaccatgatgccaggctggtcacgaactcccgacctcaattgatctgcccgccttggcctcccaaactgctaggattacagatgtgagccaccacaccctgccaaaactttcatcttaaaactatgagggagaccttgaaactctatgtgggggaaattgaaactgcatatgggggtcttgaaggtgccactgcacaccttgcttggcctgagcaaacctgcaggttacttccacccgtgacccacgtggggagactgacgccagagacctcctccccacacaccacgcctctcctcatccctcaacactctccgggacccgcttccgtccaaaaaacccccatgggccaggcaggcgtaaggttgcggcccagggaggggcagcccgttccctagggccacacggcccagccccttaccccgttacttggggcaggggtcgattccgagccaagggttggggcgactgacctagagtgactggagctaggcccgcggctgcctgagttgccccatctctatcccaggagagggaaccagtgccaggaggaagaccaggcgcccgcccctgcggacgctcctagccccttagctaaggtctcaggacaccggctggcggtgaggacggggcagctcaggggaaaagaaagccagggagggccgggggctccgaggggttttagggaggggtacagcagttagccaggcggagggaatgccagtgcaaaggccctccctgcggtgggaatgagcttactcaggggcagtgaggggtcagcgaagagggagatgcccggatcctcttctattgtaagatcgccccctggcggcccagtagagaaggggcagggagatggggccggtccaacctcccgtctaccctccagctctcccagcctggcagatgagtggcccccttctcccagcctgggtgtccccaaaggcaagaaggaaaaacagaatcccagaccttgcgagagcacccctgcatggacacagccgtcagcacctttctgtgctcatgggattgccaccaagcccttcgagcaggagcacatgtgcccattttatagaggggcaaatgggctcagggagagaggggagcaagcagggtgcagaggcaggactcaaacccaagactccggccctgtctggggctctggcaggttgggctggaccaggttgagggtgtctgttgggagctggaggagccactatgggcctgtgagggtcccaggtaggtggtcaaggtgggaggctggggaatccagaacgcgggcgcaggggacagtacacatcaccagggttccctctctgtgccttggtttccctagcacttcgttgaggaaggtgagaacatcactggctccctcctcaaatggtcccccactcgttttgggatctgctggggattcttgcttcaatccatgtgcccacgggccactgggagtccctacaacgctgccagtggccccatttaacatgcaggtcccaggtcaggcatggtggctcacacctgtaatcctagcgctttgagaggccaaggcgggcttatcacctgaggtcaggagttcaagaccagcctggccaacatggcaaaaccccatctctacaaaaatacaaaagttagccaggcatgagggcgggcgccttaatcccagctacttgggaggctgaggtaggagaatcgcttgaacccgggaggcagaggttgcagtgagctgagatcgcgccactgcactctagcctgggtgacaaagcaagactccgtctcaaaaaattaaataaaatgcaggtccccagttccctcagcggaggctcctacagatttggatgtgtctagagattgaaagcattatccctcactttccaaattcttgctgtttcaaaatgaggaaggctgagagctgaaagcccaccatcccgtcccagctggacccacaatatgggtgatgtgtggtccaagggcgggcagaggcggttaccccagtcaggatcacacactccaggtatttagctaccatttgcaaaacactcttgctagaggtagtggtgtgtgtctatagttccagatactcaggaggctgagacaggaggatcacttgagccctggagttcgaggctgcagtgagctatgtcactgtactccagcctgggtgacagagcaagaccctatgtctaaataaataagtaggccagcatggtggctcagtcctgtaatcctaccactttgggaggccgaggcaggcggatcacttgaggtcaggagttcaagaccagcctggccaacatgacaaaactccatctctactaaaaatacaataattagctgggcctggtggtgggtgcctgtagtcccagctactcgggaagctgaggcaagagaactggttgaacctgggaggtggaggttgcagtgagctgagattcacgccactgcactccagcccgggtgacagagcgagactctgtcccccctcccctcaaaaaaaaattatttatttaataataaaaataaataggctgggtgcggtggctcatgcctgtaattccagcactttgggaggctgaggcgggaaggtcacctgaggtcaggagttcgagaccagcctggccaacatggtgaaaccctgtctgtactaaaaatacaaaaattagccaggcatggtggtacatgcctgtaatcccagctactcgggaggttgaagcaggagaatcacttgaacctgggaggcagaggttgcagtgagctgagatcgcaccactgtacttcagcctcggcaacagaacaagattctgtctcaaaataaattaattaaaataaaataaaataaaataaaatataaaataaaataaaaagaaacacaaaaattagccaggagtggtggcacatggttatagtcccagctactcaggaggctgaggtggaaggatcgcttgagccgaggaggtcaaggctgcagtgagccatgattgcaccaatgcactccagcccaggtgacagagtgagaccctgtctcaaaaaaaaaaaaaaaaaaaaaaaaaaaaaaaaaaaaaaaagctgggtgtggtggctcatgcctgtaatcccagcactttgggaggctgaggcaggtggatcacttaaggtcaggagttcaagaccagcctggccaacatggtaaaaccttgtctctacaaaaatacaaaaatcagccggacatggtggcaggtgtctgtaatcccagctactcgagaggctggagcgggagaattgcttgaacctgggaggcagaggttgcagtgagccaagatcacgccattgcactccagcctgggcaccagagtaagactctgtccccattcccctcaaaaaaaaaaaaaaaaaaaaaatcaggaggggaattgatgagactaaagggtacatgcattcttattttttatagagatgggttatcactctgtctcccaggctggagttcagtgacatgatcacggctcactgcagccttgaactcctgggctcaagtgatcctcccgcctcagcctcctgagtagctatggtgtccatcacatctggctaattttaaaaaatgtttatgagacagcggtgtcactatgttgtccaggctggtcttgaactcctggcatcaagcgattttcccaccttggcctcccaaagtgctgggattacaggcctgaaccaccatgcccagcctcaacgtgtccacttttaatatgaatagattctagaaaattgccctcctgggcggctgtaccagactgtacccaccaccactgccttcaggctgggagccccccgccctgctgcttcctcctatctaggggctcggggtgcaggtcacaaagcctctgagcctcattgtccccacctgttatgtggagacgcctatcagcacccacacagctagcaggcagttcaagtccctggtgactcctgtgtccctgtaatcacctttatggcttggttactatcatgcagccaacttttaggcacatttgaatagtgcaatataaaatattaataaagtgtgactttgtgtgcagaatttgacctgggttgggggggtggggcgggtgcagcagctcacacctgtaatctcagcaatttaggaagccgaggcgggcggatcacttgagcccaggaggttgagaccagcctggccaacatggcaaagtcctgtctctaataaaaatacaaaaattagctgggcatggtggcgcatgcctgtagtcccagctacttgggaggttgaggcaggagaatggcttgaacccaggaggcagaggttgcagtgagccaggatcatgcccctgcactccagcctgggcaacagagggagactctgtgacacacacacacacacacacacacacacgcgcacaacgaatttgaccggggtggggatttcttttatcgaaaccccccaagaggcctagctctgaatctctgaaccgtgatctgcattcacgctacaggcagaggagggcgggcgggagctggaggcgtagctgcccacaggctcagctccagcctctggcaggcacatccagtcaccgctttgtcctcagcacccagaggagctgcccggcaggtcctgccctctccctccctcaaggacctgcccagcagctctcccgggctcacagccttagtttccctcccacaccgcatgtcccccagtgacctctttgctctgaatccccccaagggctgacgaggctagagcctccgattttctagtagttgtggccccatcactccactgaagctgtcacacccgatgctggacttggaggtggcttcttgatcctggtggagcttcacttctgctcctggtgtctgtccttctttctgcttctatgacatcctctcctagtttctgtcccatattttggcctccgttgacttccaaattgctctctgcagagcaggcctctcccatgagtgcgactcccatgtgcagctgggggacggacaccctgggcctgacagcgtggagctgaaccggtctccccctcaaaaccatccccgtctattccaccggagacttcgggcaccgtgactcctcttcatcagcaagtactgtggcgccaccttcgcctccatcacgaactcagcgacacttgaccatccaccacctaggtcccaggaccctcctatgcccctcactgctgtctgtcctggatgcagcattggagtggctgtgaagatgctgagtctaatgggcacccccgagggctggcacctcctgcccctcctctgtgtgtgtggacacctcgaggtagggtcagtgctctccgtacgctcatgctcacctcctgtaggccttgtctcagaaggcaccttccccagttgggatgggactgagccacaaagcagaaggcgcactggcccgtgctccaacgtggatgaacctcaaagacacgatgctgagtgaaggaagccagacatgaaggccacacagtgcacaagcccactgatctgaaatttccagaccaggcacatctgagacaggaagcagactggtggccgccagaggctggggaaagggaatgaggagtgactgctcatggggacaaggctttttttgggagatgagaaagttttggaaatagaagtgatgatgttgtgaatatattcacttcattgagttgtgcactcaaaaatggcatacttggcagggcacaaggctgaagtggggagatcacttgagatcaagagttcaagaccagcctggccaacatggcaaaacctcatctctactaaaaatacaaaaattagccaggcgtggtgcatgcctataatcccaactattcaggaagctgaggcacaagaattgcttgaacccaggaagtggaggctgcactgagccgagatcgtgccactgcactccagcctgggcgacagagcgagacggagtgcagtggcacgatctcaactcactgcaagctctgccttctgggttcacgcgattctcctgcctcagcctccccagtagctgggactacaggcgcccaccaccatgcccgtctaattttttctatttttcagtagagacggggtttcaccgtgttagccaggatggtctcgatctcctgacctcgtgatctgcctcagccgtccaaagtgctgggattacacttcgtgtgtgagccactgcgcccggccaaaaaaatgttttttaaaggggaaggggaagctttatgttatgtatattttaccacaatttaaaagagaaaagataaaaaaggccttctcttggaaactggccctgaacccaccccccaacttttgcgtgtgtttctgataacttctgtctggaatgtagctcacaagagcagggacatgccctctgtctgtgagtcttgggctgcagggggccatgaggcaggcagactggatgtgacaacaggaacttagggtggggatgggagttgccttcatttcctggctgcaaatggtagaaagcgcagccacaccaccgtagggagggaatcccatgccagggctgactaggttatgagcagggggtgggcagaggtaccacgactccaggcttctagtccctggatgctcttcccacctagtcatgccttgggccccgcaacacccgaggctgcacagagcccagggccctggttcttggtgccgtccagcacccaaacatgaattgggggatgccaagctctaagccgtgcacagcagtgggccaacaggacctcacgcacagtatgcaggaaaagtgctttggaagtttatcgtctttaatgacatttcaactgaaaacagaaaccagctgggcgcagtggctcacacctataatcccagcactttgggaggccagggcaggtggttcacctgaggtcaggagttcgagactagcctggccaacatggtgaaaccccgtctctactaatacaaaaaaattaactgggcatggtggcgcacgcctgtaatctcagctactcaggaggctgaggcaggagaatcgcttgaacctgggaggtggaggttgcaatgagccgagatggcgctattgcactccagcctgcgcgacaagagcaaaactctgtctcaaaaacaaaacaaaacaaaacaaaacaaaaaaacagcaaaagagcaaatagagcaaaacccgaaaaaagtgcaaaactaattcccagtaaaattgagctccgaacataaaataaatatatataattgagacagggtctcactctgtcacccaggctggagtgcagtggcgtgatctcagctcactgcagccttaacatcccgagctcaggtgattctccctcctcagcctgttgagtagctgggactacaggcatgcgccaccatgctcagctaattaaaaaaattttggggtggggggcggtcgggcacggtggctcaagcctataatcccagcactttgggaggctgaggcgggcagatcacttgagctcaggagttcaagaccagcctggctaacattgtgaaaccccatctctaccaaaaatacaaaaaattagctgggcatagcggcaggcacctgtaatcccagctacttgggaggctaaggcggaagaatcgcttgaacctgggaggcagaggttgtggtgagccgagatcacaccactgcactccagcatgggtgacagagcgagaatctgtcccccaaaaaaaaaaaaaatctgaaagcagaatttttttgtagagacgaggtctcactatgttgcccagacgggtctcaaactcctaggctcaagcaatcctcctacctcgacctctcaatgtgctgggattacaggcatgagccactgctcccagccaggacattttaaaatcagaacagaatgatacggtcccacagaagacagtgttgggagtctgtgcctgagcggcgcaggtgagtggcaaaatcacagcacacatgacactgcagctgtgaccggtgtcaactaccacccaaaacaaatctggcaaacagacatcggaattaaaataagtcaaaaattttaatgggaaaatctgtgcccagtcctagaacagacaattcaattcatagcgttaccataaaattactgtcaaaaaaacgaactgaagtgggagaatgagtggcgtttcaggccatctcgagtcgcagcagacacatgagccggcgccacgggcctggctgaggagcaggggctcatgggcaccaccacccatctgggttttctgaggtcgtcggcggcacgttcagtaacaaagcaacggctggcgatacatggcagctcacgcagcgctctttcctgcttatcccccaaacttaattagatgtactggagttgatgctgccagggtctccagcaggtgaggcagttgcaggttggggggtggccccctgccagctaccctgggcctgaaacgacagagactgagcatcagagtgggtggccgtgagactggtgactacccagcccacgtgctgcaggcggagcctccaggggtccctgggaaggcttggaaaagatccacagatgacctccagctcagtggaggagggaagggatggaggggtcggtcctgggtcacagctggccttgccacctgacatgggacatggacgagcttccccggcaggaaaactggcctctagtggcttccctggggcttaggcaaaggactgactggcatcgggtacaacaagggctcctgcccggcgaggggcagggaggcaaggtcaggcctggagcccatgatgacgcccggagcgtcatggtgagactcggtgggaaaaaggggctctgaaacctggcccaacactggcctggctgggcagcaaggagggtgggaggcaaccacttgtcataaggggtgggggctctgtctgcagtgcagagacggcatcacgtccaacggcgctaagacgtttgtccacaggacccacccccactatggtgggcacggtacaggttaaggaagtggctgggactgctctgcccgtgagtgtgggagcagctcagacgggtgcaccacctgggggcactctgctctgaactggggtggacacacagctgctggcgcgtagtcaggtcccaggggtgcaaagggcaaggtgaggcccctcacgtgtgtccctggctgggggctgcatggtgatggggggcagctgccacagcaggacagtgtgggacgtgtgcttcccaggaccaggtgggaccccacagacagcacaggaggcatccgttctctgaacccctgggagagagtggtgagttgggaggggcacccggctctgcagtgccctggcacacaccacacacacagcctcgtgcctgtgctgggcacatgacacctgggcctcctcagtgtcttcaagacggtccccactcgctgccttcccagccaagctgcggcactgaggtctgagcccgagggaaggccccatctctcctccggcctcctctgctggctgcctgcccctccctctcgagggaaggacaccatgtcctcccacagtcctctaggaggtgcccttcccctccacagccaaagccctcatcttggggttcatccccactgactgttcccagcggctgccgtggtgacaagtggaggtgggggagggcacagtcattacagagtggggccctgcagagctgtgccccagaggtggccgcgcagcatggcctgtgtggctgctgggacctctggggaagctgccccaaggccgaggggtggctgacaagacgaccctttctgagaacctaccacccacctgggcgctgtgggacagtgcctgagactcacctgggactgcaggcagcctcccccaggaggaggctggagagaggccagagtccgcagggtgaggaaggcgtccccagcgctgggcagcgggaagggtccagaggagcctggaagagatgggagccggggtgggcagagtcgtggcgcctcctcaggtggaacccacccagcccctcagccggcaggaggcctcgaatgtggctcctgcccctcctcagcatccggcctctgctcctcagcccccacccaggcaggccagcgggccctccccaccacactactcatgtcccctcatggcttgtcttttttttttctttttaagacagtctcgctctgtcacccaggcttgagtgcagtggcacgatcttggctcactgcaagctctgcctcccaggttcacaccattctcctgcctcagcctcccaagtagctgggactacaggcgcccaccaccacgcccagataatttgttttttctttctttttttttattattattatactttaagttttagggtacatgtgcacaatgtgcaggtttgttacgtatgtatacatgtgccatgctggtgtgctgcacccactaactcgtcatctagcattaggtatatctcccaatgctatccctcccccctccccccaccccacaacagtccccagagtgtgatattccccttcctgtgtccatgtgttctcattgttcaattcccacctatgagtgagaatatgcggtgtttggttttttgttcttgcgatagtttactgagaatgatgatttccagtttcatccatgtccctacaaaggacatgaactcatcattttttatggctgcatagtattccatggtgtatatgtgccacattttcttaatccagtctatcattgttggacatttgggttggttccaagtctttgctattgtgaattgtatttttagtggagatggggtttcactgtgttagccaggatggtctctatctcctgacctcgtgatccgcccgcctcggcctgggattacaggtgtgaggcactgcacccagcccatgccgggctaattttttttgtattttcagtagagacagggtttcaccatgttggccaggctggtctcaaactcctgacctcaggtgatccactcatcttggcctcccaaaatgctgggattacaggtgtgagccaccgcacccagacctttcatgtcttttcttattagtatcgccattctgtccccaaagcacaggtatctgttggttgggatcatggccaagaggaacagaactctcacagttgaaacagaagaaagagttacacagagttgaccactgggggaagggagatgtggtcccactgtggcctccccagatgcagctcagtggccgtccacatgggtacagatgactgtccctgggccagcctcactcaccggagctaggtgttgacaggcagctggcgtggttccctgggaccccaacttccgtggtatccacagccgttttacccgtgtaaatggtagcctcttcttgaaacttccccatgttctttttataccggattcttttgttgccaaaccagttagagacctgcggacacacaggagtcactggaggagctgacccagcgacttctgagacacgacgcagtctgtgggttccctggggtgcccgttgctcccactgccttagaagacaacactgcaccctggggctatgaagagtctgggactgagaaggtggcgccctctgaaccacggacccagggagatgtccacatgggttgaggacaccctggagctggcgtgtcttagaactctgctgcctaaaactggatgttgctggaacctgaacctgggaaggggctggaaggaaaacaagactgtctgaggtgggccgggagggacagcgcctctggctgccatgcagcaggcggcaggttacgttccgtgttctcttcaggaaaagtgagagccagggagacctggggacccagtaactgcgatcgaatcccaaacttatcaaatgaaaacaaggtgaactctgaaggggtagttggaatgtaccaggtgctaggataagcacttctcatatattcatatatttttcttaattttaattaaaaaaaggttttttggccgggcgtggtggctcacgcctgtaatctcagcactttgggaggctgaggtggggggatcatctgaggtcaggagttcgagaccagcctggacaacatggagaaaccccatctctactaataatacaaatattagctggacacagtggcacatgcctgtaatcccagctactcgggaggctgaggcaggagaatcacttgaacctgggaggcagaggttgcagtgagccaagatcgcactgcaatttagcctgggcaacagagtgagaccctgtctcagaaaaaaaaatatattttttctttttttttagagatagggtctcgctctgttgcccaggctggtctcaaacccctgggcttgagagttcctcccgccctggcctcccaaaatgctgggattccaggcccagcctcatatatcattctgcctcatcctcatgaggacctgggaggcagctgttatcgtccctgctgtaagaaagcagaggcaggagaaaaaggagctagtccatggccaaggtggaatcagcccagctctgactgcaaactggcactggagtcccccagggaggggcttgtcacctttggtggcactgctgatgcttgggctccatctgctctgtgggggctgtcctgtacactgcagggtgctgagcggtatccttggcacccactgggtgccaggagcacttcccttctctagtcgtgacaacaaaaatgtcccctgggcagattcacatgggtgagcaccccagggccagcgccttcctacaggcatggagacgtccatccagggccacatttcagtatcccaaagcaagtaaaataaacgtatagtataataacacacagaaatgaaacagctgagggatggaagaggattgtggatgacctttgctacttcaaacatttttttctcactctgtcacccaggctggagtgcagcggtgcgatctcagctcactgcaacctctgcctcccagattcaagtgattctcttgcctcagcctcaccagtagctgggactacaggcacgtgctaccaagcctggctaatttttgtactttttttttttttttttttcggagacggagtctcactctgtcacccaggctggagtgtggagtgcagtggtgcgacctcaactcactgcaacctccgcctccctggttcaaatgattctcctgcctcagcctccccagtagcgggattgcaggcatgtgccaccaagcctggctaatttttgtatttccagtagccacggggtttcaccatgttggccaggctggtctcgaactcctgacctcaggtgattcgtccgccttggcctccaaagtgctgggatttcaggcatgagccaccatgcctggccaacatttggtgtacttacattatccttgcaatgttaagtataaaaagaaggatccctgtctgtgtgctctctgttccaaacatagtgtctgcctaccccgggggtgtgagcagccttctcttgatccacatgggaggccccagaggctccatcctggttgaagcagccctggttgtcctccagacaattgttccttgggggccaaatgtctcacgcttctccaggggccttgaagacccagaggcgcagccccttgctccagctctggccttgtttctgacaccacagcagatcccgatgagcaaagtcatatgtgactatgacctcaggatgttttgctgcctgcgtgaccccgaggggttccaattgctctctgtcacagagacttgactggacttagcctgggttggagcagagcatggtggtgaaggactagaaactcagcccctccaactgcaaagtagggagggctgtggtgacatgcagcaagccatgctgtgggtcagcacctgccattcctgctgccatagaggctgtggggctgtgcctgcccaggtgggagggcggcacccaggccctgttccacacactcatgctgccacgggggtatggcctggacctggcttgctgccataggctgcctggacttactgtttccatgttaaaaccttcggaaatatttcttagcctcttggtcttagtgtctccctctttcacccccagttccacagaggacactggtggctgcctaccaggctatagagtcagggagctcacactctctaccacgtcacctcagggggctcacactccacagcatcccccagggaactcacactccatctcaatcacctcagggagctcacactccatctgtatccctcagggagctcacaccccacctgtatccctcaggcagctcacactccatctgtatctctcagggagctcacactccatctctgtccctcagggagctcacactccacctcaatcacctcagggaactcacactccatctttatccctcagggagctcacattccatcagtatccctcagggagctcacactctatctgtaaccctcagggagctcacactccatctgtatccctcagggagctcacactccatctgtaaccctcagggagctcacactccatctgtatccctcagggagctcacactctaccagtatccctcagggagctcacactccatctgtatccctcagggagctcacactccatctgtaaccctcagggagctcacactccatctgtatccctcagggagctcacactctatcagtatccctcagggagctcacactccatctgtatccctcagggagctcacactctatcagtatccctcagggagctcacactccatctgtatccctcagggagctcacactccatctgtatccctcagggagctcacactccacctcagtcacctcagggaactcacactccatctgtatccctcaaggagctcacactccatctgtatccctcagggaactcacactccatctgtatccctcaaggagctcacactccatctgtatccctcagggaactcacactccatctgtatccctcaaggagctcacactccatctgtatccctcaggaagctcacactccgtctgtatccctcagggagctcatactctgtctgtaaccctcagggagctcacactctgtctgtatccctcagggagctcacactccatctgtatccctcagggagctcatactctgtctgtatccctcagggagttcacactctgtctgtaaccctcagggagctcacactccgtctgtgtccctcagggagctcacactccacagcatcacctctgggacctcgcattccatctgcatcgctcaggaagtcctcaggtctctctgtgggtacacttgcacccctgcctcacagatgaacggggagagcgctggagtcccacatttgtaatgcagagcctggatctgagctggcctggctgactcagagcctggagacttggctcctgttccacactttttttgtttttcagagataggatctcactctgtcacccaggctggaatgcagtggcgccatcatagctcactgcagcctcaccctcctgggctcaagtgatccttccacctcagcatccgaaggagctgagaccacaggtgcacaccaccaagcccagctaattttttaaattttttgtagagacagtgtctcactatgttgcccaggctggtctcgaactcctggcctcaagcgaccctcctacctcatcctcccaaagtgctgggattccagcagccatgcctggcctctgcacacatttaacaaacttccctgggtgtcctcatgggacctagtcatccactcctcccaggcgtggcgagacgtggcaggagagaacgtcacctgggagatggtgaggccgcccttcctggccagctcttctttggcttcttcgctggggtaagggttgttcagatgggagtaaaaatactcattcagcacttccgtcgcctgcttgctgaaattccgccgcttgcgcctgcaaaaacagccgccttcgtaggcattaatatgctgggactccagtaccacccccacctctagttctgagtatgattttccagtagttctgaaaacagcaatcacttgaggtcaggagttcgagaccagcgtggtcaacatagtgaaaccccgtttctactaaaaacacaaaaattagctgggcatggtggcgggagcctgtaatcccagctactcgggaggctgaagcagtagaatcgcttgaacctgggaggcggaggttgtggtgagtggagatcgcaccactgcactccagcctgggcaccagagtgagactccgtctcaaataaataaataaataaatacaaaataaaataaaaatgaaaacagcaatacttcaggccttcttcccaagaggctgtgaggcctccaaccgtgactgcagacacagcctccagggctgtcttcaacccaagccagcactatttccctccagtccctcagagccggcccttgaggttttgggtacgtacaggccctgacctggcatcgagcagccgcgaacgcagggtcatcactgcctcacaggtgctctgcttcaactgcatctggatggcgctgaacttgccgtgaatggcgccgaccatgcgctcaatctccttaggggagacaggcctcatcctgctctgctcctggaggaggttggtgacgtgcgtggtgaactcacgacaggcctggggtgggagcacagacacgccggcctgtgactaggcagcagggtggcacagggcagcaggttccacagcggagcagccgcctgccaccccctgtagttcacacaccggcgggtgactgttaagtaaatggaaagggctttcagtaacaatggaccacctctgcagcgaccaactgcatggactccctgttctgcgccacgaaagaaaggtggttagcgttccgtgtttcgctttgacaaatgcgcattcacatgacagaaactcttccatgcagaaagatcacctgttcatatttctctagctcagagtggtaaatctgtcggatctgggacagcttggccctgtagtcagagtgctcaatgctattgtcatttggacagccacctggtgttgctgtgccggccctggccaccgctcctcctcttcctctcttctcgggcctgcacacgccctcagccagcagcatgttatccagcctcaggagctgggcgtcagggggatcttcgtcttgaatgccacggatgcttaccactagataagagagaccgggacaagtcacaattcattttctggagagaaaacaaaccatgagaaaatgtgagcactggtgttatgtctgaagatttttgcatagaacccttcgggagaaaggaatactccactttatcaccaaattggatgatggacactgagcaccccgctaagacatgggtccaagtgccatccttagagcgcagtctggggaggaacggggagacacaggtcgcagtttggcatagcctgtgagggcaaaccttggtcacagctgtgtgcacgcagcagggccaggcaggcgcctgttgctggggtcacctgaacccctgaaccgagtctcaagaagtgctggggaagagggggcacccaagatgctgcatactgataaaggcaagtggcaggctggcattggcagcgtggctggcctgggcccaggactgtgcagctgtaggcctgttgtggctggtgggtggggtgtgtgtgtgttggggtgggggtgctgttataaaactggataggaaaagcctgataaagaaagtgccagaaaagatgaaataacccactgaaagattttaagcagagaaacaagataatgggccctacaatttggaaatgccgtcccagctctgcagagaggggacctggataggggcagggctggactgcaggggaagcagtcaaagggcagccaccatcaaggtatacacagctgtggggtctgcaggtcagctacagggcagtcagagaacccccaggattcgtgtcctgggacacgggtgtcagagaagggaagactccagggtcattcccagattctgccatgggcagcacagccaatggcatcgcattctcccaagtaaaaagcctggagctgcagcttgtgcaggtggggctgagtgaaaaggtggcttcacggccgggcacagtggctcacgcctgtaatcctagcactttagaaggctgaggcgggcggatcacttgaggtcaggagttcgagatcagcctggccaacatggtgaaaccccgtctctactaaaaatacaaaaattagccaagcgtggtggcgcctgcctgtaatcccagctactagggaggctgaggcaggagaatcacttgaacctgggaggcagaggatgcagtgagctgagatcttgccactgcactccagctggggggatagagagaccccgtctcaaaaaaaaaaaaaaaaaaaagtgttctcttagaatcaggcttttttttttttttttttttttgagatggaatctcattctgtcacctaggctggggtgcaatggcatggtctccactcactgcaacctctgtctcccaggttccagtgattctcctgcctcagcctcccgagtagctgggactacacatgcgtgccgccatgcctggctaatttttgtatttttagtagagacaaggtttcactatgttggccaggctggtctcgaactcctgacctcatgatccgcctgccttggcctcttaaagtgctgggattacaggcatgacccaccgtaccgggccagaatcaggctatcttaataaggtcagctacttaccgaattagtgctcagatgacaattccgtttgattatatcatatagtcatttacaagtgtccctttcttattccctacataacagatgaaccttttctgtcaaaaactcactagtcaaaactgaaggaactcaagcgatatccttgtaagaattttccttagagatttccacttcaggctgggcgcagtggctcacgcctgtaatcccagcactttgggaggccaaggtgggcggatcacctgaggtcgggagttcgagaccagcccagccaacgtggagaaacgccatctctactaattagccgggcatggtgtcgagtgtctgtaattccagctacttgggaggctgaggcaggagaattgcttgaacccgggagacggaggttgcagtgagccgagatcacgccattgcactccaggctgggtgacaagggcgagactccgtctcaaaaaaaaaaaaaaaaaaaaagagatttccacttcaacacttagtgctagtttattaagcacacatgcaacaaattttataaaccaggattttgaacaagagacaaaaaaaattagcaaccagatccaaggactgaccacaaacctggtgcttaatacaggatagtgttggccaggcgcagtggctcacgcctgtaatcccagcactttgggaggccaaggtgggtggatcacctgaggtcaggggttcgagaccagcctgactaacacagagaaaccccatctctactaaaaatacaaaattagccgggcatgatggcacatgcctgtaatcctagctacttgggaggctgaggcaggagaatcgcttgaatccgggaggtggaggttgcggtgagccgagatcacgccactgtactccagcctgggcaacaagagcgaaactccatctccaaaaaaaagaaaaaaaaaaaatatacacacacacacacacacacacacacacacacacacacacatataggatagtgtcccaccttctccaaaactgtttcttactcaattaaaattggaaaaagcaatatgagaaaagtgggaagatttcaagaagaatccacacaccctgttaaactttcaaggtagaatagatggcggcacaaagttgcagacatgcagagacttaaccacaagtctccagtacccaggcagcgaatgtccatggcacaaattagtcatgcaaattagacataaatttgtctaatttgataataagaacataaactataatagaaacagccaaaatagctaatacatgagattggttaagtaaattatgatagaaccataaaataaagccgccagcaactctattttcctttttttgtttttttttctgagatggagtcttgctctgtgtcccaggctggagtgcaatagcacaatcttggctcactgcaacctctgcctcctgggttcaagcaattcttctgcctcagtctcctgagtagctgggattacaggcgctcgccaccatgcctggctaatttttgtatttttagtagaaacagggtttcaccatgttggccaggctaatctcgaattcctgacctcaagtgatccacccaccttggcctcccaatgtgctgggattacaggcgtgagtcaccacacccagcctcacacccagataatttttgtatttttaggagatacggggtttcaccatgttgcccaggctagtctcgaactcctgagctcaagcgatccacccgcctcggcctcccaaagtgctgggattataagcgtgagccaccgcacctggcctgtttctaaaatttctaccaccaagtctatgaaaaatcatcaccaggaatgagggcatcaggatacatccccttgggaggctgaactatatcagagtgggtattcctcaaactgcttttgtgcatatcactcaagcttggccctgtctcttcatagacgccctcctctgcctccacatacttatttaagcagacactacaggctatacttggtgccagctccctgcagcccgtggccactgtggcccttggcctcagagcttcagaaaacaccccctctccctgagtgccaggctgaactgaaggttcccaccacctcacactcaaggaccctcctcaccggctcactcagtctctttgggctgcaccgaggctctttctgagatggctgaaggaaaagtgtcccttttattagctggcagacagccttccagtttggtggcccaattttcctttttttttccttttttttttttaaagacagagtctctctctgtcgcccaggctcaagtgcagtggtgggatctcagctcactgcagcctccaccttctgggttcaagcgattctcctacctcagcctcccgagtagctgggattacaagcatgcgccaccacgcctggctaatttttgttttttgtttgtttcaagagaattcaatcgtttattgattacaacgtttgtatttttagtagagacggggtttcaccatgttgaacaggctggtctcgaactcctaacttcaggtgatcctcccacctcggcctcccaaagtgctgggattacaggcgtgagccaccacgcccagcctggagactcaattttctaacaatcttactttatcttcaagaagctccaccatcctggctaacacggtgaaaccccgtctctaataaaaatacaaaaaaaataattagccaggcgtggtggcgggtgcctgtagtcccagctactcaggaggctgaggcaggagaatggcgtgcacccgggaggtggagcttgcagtgagccgagattgcgccactgcactccagcctgggcaacagagcgagactctgtctcaaaaaaaaaaaaaaaaagctccagctgtctgttttagttcctcccactgccagcacccatgagcgaggacagcccacttggaatgatgctcatggggtgctgtgcctacaatctgggccttacagatctgggtgacagtcacagcaagtggacacccttggacagccaggtaaaggccgctcccagaattagcctgtgtttgcctattcctcgtaataaccctcccctctcctcctaatctctcctggctcaaaacagacaatggctgtcctctctgtagtccctctgttttcaaatcctattgattctgcctcaacaatcaactttccacttatccctccctaggtccctactgtgctaaccctctcctgccctttgtgacctgcggaggaaagtctctcccctcccatccctcatgcacacctgcaggccaacccttttcaaacacatcatgctgctcttttgttcaaaagaaacccagcctctaacatccttctggacctgcctttggaactgttccctcgcggagccttgcacagcctctgacaagcacagatgtcccacgtgcccctgaatcttgttcaacagctccttcctgagcacccatggaggtcgcggccaggtgtcatgtgtgggcggaggatacacaggactcagtccctccacacaggaccccagcatgctctgacagccggggtgaggaaagccacctccacaccttccattacaggcccatttgaaatagggaaaggagcatggtcaatgttggcacatgcagtgtaatgagagtgtgtgtgttcatgtgggtgtgaaatgcagggctgccgcagaatatgtggcattctttcattcattcatttatgtatttaggggctgggcgaggtggcttatatctataatcccagcactttgggaggctgaggtggtaggactgcttgacctctggagttcaagaccagcctgggcaacatggtgagatcctgtttctaaaaaaattttttttttcttgagacgaagtctcgctctgttgccaggctggagtgcagtggcacgatctcggctcactgcaacctccgactccttggttcaagcaattctcctgcctcagcctcccaagtagctgggattacaggcacacgccaccatgcccagctaatttttgtatatttagtagagacggggtttcaccatgttggccaggatgatctcaatctcctgacctcgtgatccacgcaccttgacctcccaaagtgctgggattacaggtgtgagccactgtgcctggccaaaaaaaaaaattttttttttaaatcatttacttatccaacaacaaacatctgagagcccatcacaagccaggtaccacactaagtgttgaggatttttattgtatttattatttttggggtctgtctctgttgcctagggtggaatatagtagcatcatcatagctttctgtaacctcgacctcctggggtcaagcgatcctcctgcctcagcttcctgagtagttggaactatacacatgccaccacacctggctaattttttatttttgtagagatggcatctcactatgttgcccaggctggtctcaaactcctgtcctcaagcgagcctccaccttggcctcccaaagtgcttgggattatagttgtgagccaccacacctggcccgaggattttaaaaaaatataccaaaacccacaggacttactgttctccaattaaaactctcaaattacagtgagaggctgaggcgggcgaatcacttaaggtcaaaagttcaagaccagcctggccaacatggtgaaacaccatctctactaaaaatacaaaattagctgagcatggtggtgcatgcctgtaatcccagctactcaggaggctgaggctgcagtgggccaagattgtgccactgcactccaacctgggaaacagagcgagactccatgtcaaaaaaaaaaaaaaaaaactctcaaattaaagtgagaacacctgtgcctttccatttactcttcatggggtatgcattgtacagcatttctggagaagagttttgagatactggttaaccttgaaaaagtgcataatctttaatctccaaattcccattctgtacctggaatttatcctacaggggtactgacacctacaaagatgtatttacaggaggcacagtgtttgtaatcgtgggcgaccagaagggtgcagatgtgcatgagtttgggcacagacagcatacctgtcaccctcgggccctgtggtgtcacctgtgtctcttgagggtgccattatgaggcaatcagatgtgataagccttatttctttaagattacacatttttggccgggcttggtggctcacgcctataatcccagcactttgggaggtgggtggatcttgaggtcaagaggtcgagaccatcctggctgacacggtgaaaccccatctctactaaaaatacaaaaattagccaagcgtggtggcgcgtgcctgtagtccccactacttgggaggctgaggcaggggaatcgcttggaactgtgaggcagaggttgcagtgagctgagatcgcgccagtgcactccagcctggcgacaaagggagactccatctaaaaaaataataattaaaaaaaaaagattatgcttttgaggctgggcaaggtggctcatgcctataattccagcactttgggaggccgaggcaggcagatcacttgaggccaggagtttgagactagcctggccaacatggtgaaaacccatctctactaaaaaaaaaaaaaaaaaaaaaaaaattagctaggtgtgatggcacaagcctgtaatctcagctacttgggaggctgaggcaggagatctgcctgaacccaggaggtagaggttgcagtgagccaagatcatgccactgcactccagcctgggaaacagcaagactccatctcaaaaaaaaaaaaaaaaatgcatttttgctatatatgtgttataagcaaaagcaaaacttaaaaagctaagttaccgaggagaaacgctgtgccttggtcaccaccatcagtccatgctggggacatctgccctgccagctgcctcttgggtggtgcctacaacagcttcctcagcaccgtgcctttgtgctccccgtacactgatgctggcctaattatggtcattagacatgcattaccatcaattacagcaagctcagttccggtgactgttccagagcttctcagctgtgctcctcagctcccccagggcccttgactggcaggcagggaggctggaggtaccagaagcttggttcagggataccatctgtcggaggcactgacatggggaaacagacttaaaacaaaggtacccccctcctcaaactgccaggcttccttctgttcccaacttactgtgtgtggcagaaactccagtaaatcaaacaatgacataaaataaaatcgggattatgtttttctaagaaacaatatggcaatgctgtgagccgaatgtttgtgtcacctccaaattcacatgtcgaagccctaactcccaacgtgactatttggaggtgacgcttttaggaggcagttaaggttaaatgaggtcataaggatgtggccctgatctgataggattaatgtcctgatgggcagagacctcagggagctcgctttccctaagaggtcatgtgagctcacagtaagatggcggccgcctacaagccaagagaaaaggcctcataatgaactacctggccagcaccttcgtctgggactttctaggccccagaactgtgagaaataaatttctattttgtaaaccacccagtctgggccgggcgtggtggctcatacctgtaatcccagcactttgggaggccaaggagggtggatcacaaggtcaatagatcgagaccatcctggccaatatggtgaaaccccatctctactaaaaatacaaaaattagccgggcatggtggcgtgtgcctgtaatctcagctactcaggaggctgaggcagaagaatcgcttaaacctgggaggcggaggttgcagtgagccgggattaagccactacagcctggcaacagagtgagactccgtctcaaaaaaaaaaaaaatcacccagtctgtggcattttgttagggtggcctgagtagactaagacagtaacataaccccaagttgctttaatttttctccccaggaacaaagacgtggggaaaagcagaaggctcagagggaaccctcctttgccctgacttccccaagctgctcacctgccccctcacccactcagcagtgctctcacttggcagcgggctgtgctcccgcctccttcccacagcaagtgggaaccatctctgggaccccagccccatagggagaaggctaacccatggattaaatcagatgccctgactgacccctcgggtctgccactttccagtcatgtggctgtcagtggtcactccgctggccgcaagccccagttgtgaacggagctgccccaggcaactgactggatggaattacatagaaccgcaggcccggcccagagcccatcagggtatgggactaagcaaaacactcacctcacgctctccctgctgtctcaaatcagcaagaagctggcccctcaaaagcagaggcagggcctcctgtgccaatcaatcgatcgtggaggctgagcctcctccccatctccccccaccatccacagccggaatgagcgttggagacggattaaactgtggaatctgggacagagggttgacgcctggtgagaggcggccaaatctctctttgaggagtcctttggtgacagagagccaaagcctagtgcgccgacctgagttgcaatgagtacctatagtcacagcttgctctgatcacacaggcgcaggcgcagacaagcatgtccgcctgccctcgggcccacccaccgtgtctggaactgacagtgccggtgactctgcacaggtgagaatcgacatgaaggagaaaacatggggacttcctgctttctagaaaccttttgaggctttttcagtcacttactgagcacctactgagtgctgggcctgagctttgaggatgacaagtggctgctgcttgccctggggggataagaaccagggtcttgctgctgctaccggggtctcctatgctactggcctcctgaccagtgacccttagaaagaacggggccactggccacagttctgccggtgggacccagcgtggtaactgggacctgggctgaggttaactttcctgttccagttttcagaaggagagctcaacttccatcagctccagcttatcttgtagtcaaagagccaaaggtaataaggaaatgagttctacaaggcattctggcaaggtgctcaccaggagccactttcatttgtagtgagagtgtttcctccctaaacaaggcctctgatattggaggacagggataggggaggcaggtggtaaataaccttctgtacttagacctcaactgcttaaaagaaaaaacaccagctactggggaggtcactcaggcaggagtgcagtggcacgctgcagccttgacttcctgggctcaagtgatcctcccgcctcagcctcctgagtagctgggactacaggcatgcgccaccctgcccagctaatttttatattttttgtagagacgaggttttgccatgttgcccaggctggtcttgaacccctggattcaagtgatcctcctgccttggcctcccaaagtgctaggattacaggcatgaaccactacgcccgaccagattttaccttgtttagagtaggactcctagaaaggtgatctgtcctctgggccagcccacacctgtcacctgcctacagcgaggccagcacagacaccagcatccgcacatggaaatgtattgcaatttgacagagtaatttgatgtctattgaatttaacacaacttttggccttactgacttgtatgtctgttttatttttcctttcttttccccagtagttcatcttgcttctgttttacatggccaccatgctggggtggccaaaaccgtgcctgaggctggaggggcctgaaggctgagcctgagctgctgctggaagctctgatgagcctctgaaccaccccagtcccagatccaaactctcagggcccgtaagagctggggtggaacagtccagaattgagagtaaacctatttcctcgcacgcatctgtaggatgcctgcttcccctctgcgtcattactgtcttgcgggtggcggtggcactgccacttggaaggagccggcattccacgttcctgtgtcagggaggtgatgacacagggcagagcgcctgctccagcacttccagtggagaaaacaccaggacaccaaacaaggaaggggagacaaaggccacgctgcaggaggagcgacctactcactttgggagacctgtttggtgggaagcaggcctgtccaaccccaagaatgccagcccaggggtgtcaggaaggctgcgggaacccaggtcatgcggtgctgccattggctttgggagctgagggactggataaggttattggccaaggaaggtgttcctgccacgatgcaaggtgacagtgtgagaataggtgggggcttccaagtggctgggtggtgctctgagcagcaggagacgagactggctgtgagaggcctatggaggaagtggtaccgcctgattccccaggagagtgccctgggatgtgaaggacatcgtggggtggccccagcaggaggctggggagcccaacacagtgaaggcagaaggccagcaggactcttccatgagaacccaaggccccctacctttgggatctggcctcatttgctcctggcacctcctcccaccccccaaatcctgctgctgcacactcctctcacctctcagctccaatctagcttcccagtgatacgggagtggggcaaggaagtgctgggtagagaagggcggggtccctggcgagggctccaccctcggccctgtgccctcggacctaagtgagaacaagcatttctgtttttgtggccaaaaggttgccttttggcctgccacgccccacatcttgtgcccaaataagcctgagaccttaagcagacacacacaagcagctggaagtcgagaggaacacaccagcagaagaacacaccaatagacactggcgggccattgatggtggaacaatgcagacaccaagggaaatccaggagagcccagtcactgagcggcccaactccagggcaaaaccaccttcccaatccaaccccctttgggccccccatccatctgctgagagctacctacaccactcagtaaaaccctgtactcattctccatgcccacatgtgatccgatttttccagtacactaaggcaagaaccccagaatatagaaagccctttgtccttgagatagggcagagggtctaactgagctgattaacacaagaagcctgcttctctttcagctaagctgaaagagcacactgtaacgcatgcccactggggctttgggagctataaacacaaccctaagacgctgcgctgctgctgtggggttggagaccacgttccccccacctgtctgactgcatgctcccccttaggggtttgagctgtggggcaccgaagaagtgagccacatccgtcacacaccctgcaagggggaaaagggaacactcctgtttcacccgggctccgggaacaccaagctcaggcctgcgtcatgaactctttcccagcaagagagcggaggtggccaggcgcggtggctcatgcctgtaatcccagcactttgggaggctgaggtaggtggatcacctgaggtcaggagttcaagaccaacctgaccaacatggcgaaaccccgtctttactgtgatcccagctacttgggaggctgagacatgagaatagcttgaacctgggaggtggagcttgcagtgggccgagatcgtgccattgcactccagcctgggcaacaaagcgagactccgtctcaaaaaaacaaaacaaaacaaaacaaaacaaaacaaaacaaagatgcagaaaggccaggttcagtggctcaccctgtaatcccagcactttgggaggctgaggtgggaagatcacttcagctcaggagtttgagagcagcctgggcaacatagcaagaccccatctctacaaaaaattttaaaaaatgagtcaggtttggtggcacacacctgtaatcccagctactcgagaagctgagacaggaagatcgcttgagccccggagtttgaggctgcagtgagctgactgcgccactgcactccagccagttcgacaaagtaagaccccctctcccaccaaaaaaagatacagaaaattaacaaaatcaattaaaacccttgggcaaacctggtcaggcacggtagctcatgccctaatcccagcactttaggaggctggggttggggggaatcacctgaggtcaggagttccagaccagcctggccaacatagtgaaaccccatctctactaaaaatagaaaaagctcacgcctgtaaacccagcactttgggaggttgaggcgggaagatcacctcagatcaggagttggagaccagcctgaccaacatggagaaatcccatctctactaaaaatacaaaattagctgggcatggtggcacatgcctgtaatcccagctactcgggaggctgaggcaggagaattgcttgaacccacgaggcggaggttgtggtgagccgagatcatgccattgcactacagcctgggcaacaagagcgaaacttcatctcaagaagaaagaaagaaaaattagctgggtgtagtggtgcacacctgtaatcccagctactcaggaggtggaggctcgagaaccgcttgcacccaggaggcggaggtagcagtgagccaagatcgtgccactgcactccagcctgggtgacagagcgagactctgattcaaaaaaataaaaaacccacaggcaaatcaaagaatagaaagaaccttccttaacctgataatgggcatgtcctcaagccccacagcaaaccccagtcttcctggagatattttaaagccactgattcaaatcagacacaggtagacagggaggtccctcctcggctcagaccagcagggtccagtcaaggagaccagaaactcgggagggggacagaccagcaggcagcaaggcatgacgaagaagatgtgacccactcacaggctgaagggtgtccctacagctggagtaacccagagagtcatggatgtaatggacaacttcccctcccctccacactgcccccaacagacctcaaggtgtggtctgacatgaccaagggctggttttttttttttttttttttgagatgaagtctcactctgttgcctaaactggagtgcagtggcacaatctcggctcacggcaacctccacctccagggttcaagcgattctcctgcctcagcctcctgagtagatgggactataggcatgcaccaccatgcctggctaatttttgtatttttagtagagatggggtttcactatgttggccaggctggtctcgagctcctgacctcgtgatcacccccttggcctcccaaagggctgggattacaggcgcgagccacctcctggcccaagggctgttttatcttatggtttcctgggcatcatgggcactgagtttactccttaactctaaacaaggagacttctggagcccagcctgtttgtattaagaactgcctggctttaccttttaggccacatcccacaggttagttcatttaagtaacattctaggacaggcgctagaacaggctttgttctgttctctgaggcagaccagcctggccaacatggtgaaaccccatctctattaaaaatataaaattagctgggcgtggtagtgcacacctgtaattccagctacttggggggctgaggcaggagaatctcttgaacccgggaggcagaggttgaggtgagtccagattgcgccactatactccagcctgggtgacagtgtgagactccatctcaaaaaaaaaaagtaacattctagataaatccttatcttaagtcatggaagtttctcagatccacaggactttaaaaagaataacccttaaaaaacactcatcagtttctgaaatagtggctgccacacactagatattcacccaactgagggattatcacactaggcaaatctccgtcatctctaattaaaatacatcacaaccagtcacaactgaagtgtgtcaggcctctgagcccaagctaagccatcatatcccttgtgacctgcacgtatacatccagatggcctgaagccactgaagatccacaaaagaagtgaaaatagccttaactgatgacattccaccattgtaatttgtttctgccccaccctaactgatcaatgtactttgtaatctcccccacccttaagaaggttctttgtaattctttccacccttgagaatgtactttgtgagatccaccccctgcccaaaaaacacattactcctaacttcaccgcctatcccaaaacctataagaactaatgataatcccaccaccctttgctgactctctttttggactcagcccacctgcacccaggtgaaataaacagccatgttgctcacagaaagcctgtttggtggtctcttcacacggacgcgtgagaaatgaagatgctggaaccacaatcaaatatgcaaattaatttcatttccatatgtttacatgtttgttaattaaaacactgcagttctgaaataaactagtatgtgatttttaaaaaaatgcctactgttctgtacatttaaaaaataaataggctgagcatgtggtggcttatgcctgtaatcctagcactttgaggggctgagacgggaggatcacttaagcccaggagtcccagaccagcctgggcaacacagcaagacccccatctataaaaagtacaaaaattagccggatatggtggcttctatctgtagtctcagctacttgagaggctgaggtgggaggatcacctgaacctgggaagtcaagaatgcattgagccatgatcatgccactgtactccagcctgtctctttgagacagagcaagaccctgtctcaaaaaataaacaaacaattatatgagctgctaatgctgagtaaaaatgatatgcggtttaggcttgtttttctgtgctactgtccttgcatgtggtaacagggcaaaaggaagacagcaaaacactgtaatatatagtgctgtaatatatatttttccagatgtgccaggcagcacatctggaaaaacaagcccctgtgaggagttgcaaacatttaagagccacagctaagaaaaacagcacttggccgggcatgatggctcctgcctgtaatcccagcactttgggaggccacgaagtcaggagatcaggattatcatggctaacacggtaaaaccccatctttactaaaaatacaaaaaattagccaggcgtggtggcatgcacctgtagtcccagctactcaggaggctgaggcaggagaatcgtttgaacccaggaggtgaaggttacagtgagccgagatcgcgccactgtactccagcatgggcgacagagtgagattccgtctcaaaaaaagaaaaagaaaaagaaaaagaaaaacagcactcactgatggcttctatctaccataaacaattttctttttctttttaatttttttgagacgcagtctcactctattgcccaggctggagtgcagtggcacaatcttggctcactgcaacctctgcctctcaggttcaagtgattctcctgcctcaccctcacaagtagctgggattacaggcacccgccaccccacccagctaatttttgtttttttgttttgtttttgttttttgactaccagaaaataaacacgaactttattaatagcaatagaaagggtttccaatttctcagaatgaaaataacatgacaccagtacaagtgttaaaacagtaggccgggagcagtggctcacgcctgtaataccagcactttggaaggccaaggcgggcatatcacctgaggtcgggagtttgagaccagcctggccaacgtggtgaaaccccatctctactaaaaatacaaaaattagccgggcgtggtggcggactcctgtaatcccagctacttgggcagctgaggcaggagaactgcttgaccccgggaggcagaggttgtggtgagccaagatcgagccattgcactccagcctgggtgacagagcaagactccgtctcaaattaaaaaaaaaaaaaaaaaaaaagagtaaatgcctacatttcttgttctgatagcttcccaccacacaccaaaggttcctcaaggacagctgccacagagctgctgcaagaacatgttttccactgagcgtagtttcacagtcaactactcaagcagaagactaaaatattatttctttttagaagatcttggttgagggagcacatatcaatatggagaacagatctttgcttctcgaattcaagaaaaaacattaattaatctatcagtttttctccgatacagtgtcccagagtgctctgtgaagaatccttttacatccctactacatgcctgggtgaagggagaggagggggtggcaagctgccagtacaccagcaggcactcctggtgatgctctgggctctgctccctttctgctggtaatagtaggcatcttttctgaaagctgcagcagcttgatgtggggcggtggggaggaaggggccacttaccaatcacctcttcttgaagccgtattttttgcgttcatagaagaggtcttagagctccccaaatagacaatcttcaggcagccatccctattcttctcctggatggtgcactccttacaataataggcatcagagaccccagggcctccacagatcacacagagccccggtaagatccatagttacattcatcacatatgcacaccagagtgcagggacgcacataggagtcacagataacacatttgccatcacatttttcacacagtcatctgatggcaacaccagcctgcttgcggcaaaagatcaaatcaggatgatgtttagccatagttcccaactaagctggccaccacacaatttttgtatttttagtagagacagggtttcaccatgttggccaggctggtctcgaactcctgacctcgtgatctacccgcctcaccctccgaaagtgctggcattacaggtgtgagccaccgtgtggcccaattttttcatctgaagaaatgctctaatttcaaacaacaacaaatgagagccatgggggaaaggtctagaagcttcaggagctgggctacagtcaccatgaggtgtggtgcctctttggctgagtctcacacagggaggtaaccagcctagcaacatgcacactaaccatgaccaaccaattcccagcctgcgaatcaaagagttttaggtcatccaatgccctgactactctaaaaagaatttcccaaggaactgatctatcaataagttcaccagggctggacaggttggctcatccctgtaatcccagcacttttagaggctgagaagggaggattgcttgaggacaagagtttaagaccagcctgggcaacacagcaagatcccatctccacaaaaaaatatccaggcatggtggtgcccacttgtagtcccagctactccagaggctgaggcaggaggatcacttgagcccgggaattcaagggagcagtgagctatgatcacaccagtgcctccaacccgcatgacagagcgagatcttgactcaaaaaaagaacgtaaaaagaggctgggtgcggtggctcacacctatagtcccagcacgttgagaggtcgaggccggcggatcacgaggtcaggagatcgagaccatcctggctaacacgatgaaaccccatctctactaaaaatacaaaaaattagaggagtgtggtggtgggcgcctgtagtcccaactactcaggaggcggaggcaggagaatggcatgaacccgaacccaggaggtggagcttgcagcgagccgagattgcaccactgcactccagcctgggcaactgagcgagactctgtctaaaataaataaataaataactaaagacaaagaaaaagaaagaaaaaaaagttctggtcaggcacggtggctcatgcctgtaaatcccagcactttgggaggccgaggcgggtggattacctgaggtcaggagttcgaaaccagcctggccaacgcggtgaaatcccatctctactaaaaatacaaaaattagttgggcatggtggcgggcacctgtaatcccagctacttgggaggctgaggcaggagacccgcttgaacccgggaagtggaggttgcagtgagccgagatcgcacgattgcactccagcctgggtgacagagcgagactccatctcaaaagaaaaaaagaagctccctagtatctacggtgtgccaatcccacaacagggcagagatgaaccacagatctgccttgtgctttcttgatgctggtcttccaggaaaggagtcagaggtcagaagacaaaccagaaaagtgcaagcacacaagacagtttccgtcagtggttaagccctaagaggcagcaaagaagtgctaattcataagaatgtgtatgtgcactaaggccttaagctacaggcacactgttttagatacggcccctaccaaagaccctcaatccttgaggtaagctttattgagatataattcacatgccatataattcatctgcttaaagtgaatacttcagtggtttttagtttatttccaaggttgtgcgaccaccaccactagctaacattctcatcctccctaaagataccccgtctctatgagcagtcactctttacgccccctccctagccccgggacaaccacgagtcttcctgtctctatggatttgcctgatctggactcttcatattgatggaatcacacagcatgtgatgtgacacttcacatctggcttctcctacccagcatcatgttttcaaggtgcacccatgttgcagcctgtgccaatacttcattcctctttatggctgaataatactccattgcatggatggaccacgttttgttttgttttctttcttttttttttttttttgagagagagtcttgctctgtcacctaggctggagtacagtggcgtgatctccgctcactgcaacctccgcctcccaggtgcaagtgattctcgcgcctcagcctcccgattagctgggattacaggcatatgccaccacgcccagctaatttttatatttttagtagagacggggtttcaccatgttggccaggctggtctcgaacccctgacctcaaatgatccccccaccttggcctcccaaagtgctggaattacaggtgtgagccatggcgcctggacacacattttgtttttctagttatcatggacatcaggttgttttcagattccttaatctgtatatttatatacaatgatccacttctctgtccaacagacactttggcaatgataggatgttctagacctttctattataggaggcaccagccctgtgtggctgctgagacttgaaatgtggctggtgtggctgaggaatgcactggttaattgcatttggttttaattaattcaaatgtaaacagccctgcgttgagtatctggagccacccagctgatgagactcaggggctcaatttgtgagttaccctgagactgaggggaggaaaggatactccaatcaacctggagaataagtcccccagctgccggggtctactcccacaagaaccctaaagaaatgtacatgggactcagccccagggtacagctaattagaaaaaggatctcagttccagagaggtgactcataggcctcagggtgactgctaggacccaggaaagccccatgagcaccatgacaccccagcttcctggctgaatttacagaacccgattctgtaattgcaacagatccgaccagctgacgaggaagggaaagaatgagaatggcttatgcctgccaactactagcaaggccaatcattagtcaggaagacaaaaaggcattccctgatgttatgcattatttacatttactcctctgaatggggctctgtgcgttcctacagcacagcaagggttcctgcagcacaacagccctggctgagaaacttcttgttccccagagacacagtcacagggtggagaaggcaaagcaggccccttctcaagaacggcccaggatgggatggccgagtgggtctgcaaggggcctctggggctcagcacaccgcctcggagctgcctacccactcgagatctgagatccgaagcttttcacacaagctgtcactcatgctcatgtggaggtaaagcctgacacattccaacgtgccaggctgtccctgctctggtgccaaacaccactgtgtgaattcaggccacgcctcagtcctcactgggaacatcaatgtgacaaaccttattttttatttttatatttttttagaggcagagtctcactttgtcgcccaagctggggtgcagtggtgtgatctcagctcactgcaaacctcacatcccaggttcaagtgattcttctgcctcagcctcccgtgtagctaggattataggcacccgccaccatgcccagctagtttttgtatttttagtagagatgggtgggtgagggaggtgggggggtggttcaccatattggccaggctggtctcgaactcctgacctcaggtgatccgtctgcctcagcctcccaaagtgctgggattataggcgtgagccactgtacctggccaacgtgacacatcttaaatccaacgctttcgaattctgcaacatacctagtcccagggtctcagcaaagggactgtggcccgtatctggttctcccagctaaattcaaagctctgcaactaatcagggtttattttgttctcagaacagctcctctagacaccgaggaggacagctgtttctgggaaggagggtttgggaggaaatgcatacgctgagggtgtccttggccttcagagaccaccgcagggcaggaacacccagacactgtggtgtggtgaagctgaccccaggagacaagctttgagggacctgcctgcatacctccgacaggccattcctggggttcaccagggactgctggcagtgcatccggtgatgccaggtttacatggaggaccacgttcttttcaggctgctgtgagtgataagccctgtgttctaagtcaggcccccagacactgaatcttctgaacctcataaggggaactggatgaaagggatttcagttagtatgtatcagtcaccagaaacagtttttcaatcaacaaaaacagaaaggcaccgggacagaccctgagaacatagcgcatcctagaccctgcgctggccaggaatggtcattgttcagatgacacaggtgggtgtgtggggcccatgagtgccggccatgagggacaggccctgggtccctttcatgagtgaggacagtgtacggggtggggcggcatgcagcctggctgtgggtgactggtgtgccctggggaggcccctgtctcttagagcttcccactgcccatctgtaaaacgggagaaaagggtctgcccgaggctgtgcagggctctggggaacaactcgaggaagccccgagctgcctgcccaggctccatcaatacccaccagacttaatctttgccgttgttgttgttgtagagacagggtcttactgtgttgcccaggttggtctcatactcttgggctcaagcgattccaaagtactgggattataagtgtgagccaccatgtcctgccccaccaggctttaaatgctctgtggaagtttggtctttaccataaggcctgctgcagacttcagccagagggaaatgtgagaactgtgggttaaatcgagaagcacgccaggaccccggctcatgggattgcccttcaagaggcggcccgtgggtaccacagggtgcaggatcaggaccatgaacagtttcctctgggctgagacttggccattcctagtcacgggatgaggacagatggagcagaatcgaaatcctgtttactttcctgccactggctggtttgtctccgagactagaaggctgaggtgttcctgacatcaaggcaggtggcccacaggtgggacccacagcactcactgactgcacttcctgatataaaaagatacctggacactccaggtgacactcaggaacaggcatccctcagctccaggcttgtgcatttcagggaggagcagttgctgtctcatccctgtcctactgtaccccaaaacataccctgtacccagatgtttgagccagtcagtgggaagaaagcattagcttccaaggaaatgcccaggtggccggtgctctgagccctgcagcggccttgggactcagcttggaggaatcaaaagtcctgagtggccaggcacagtggcgcctgcctgtaaccccacaccttgggaggctgaggcaggaggatcacttgagctcaggagttcaaggccaacctgggcaacatactaagacctcatccccccaaaaatagtcctcagcgacccctagacatggtggtgtgtgcggaagctgaggtgtgaggatcacttgagcccaggagtttgaagccaatctgggcaacacagtgagactctgtgtcttaattaaaaaaaaaaaaaaataaaaaataaaaaattaaaaatgtcgccgggcatggtggcacatggctgtaatcccagcactttgggaggccgaggcgggcggatcacctgaggtcaagagttcaagaccagcctgaccaacagggtgaaaccctgtctctactaaatacaaaaaattagccgggtgtggtggcagatgcctgtaatcccaactactcgggaggctgaggcaggaaaattgcttgaacctgggaggcagtgagccgagattgcgccattgcactccagcctaggcaacaagagtgaaactctgtctaaaaaaaaaaaaaaaagagtcctgagcatggccctcaaagcctaggcagatgggggtagggaggtggggcgacaccagcggttgaaatggacagacatctcagctgcactggcaacagttggtatcaactcttgttttccctcctgaaactgctgaatttgagactaacagactcatgcagtaacatccacacaggggcagatggaattatgaagaggcgtgcccaggctgaacacccacactctcaaaaattggtttctcgttcagccccagcagctcactggtaggaaggtcaagaatgacagcttcctgagactacagttgattaaagtactttttttttttagacagggtctcactctgtcacccaggctggagtgcagtggcgcaatgtcatctcactgcaacctctgcctcctgggttcaagtgatactcctgcctcagcctcctgagtaactgggattacaggcgcatgccaccacgcccagctaatttttgtatttttagtagagacggggtttcatcatgttggtcaggctggtctcgaactcctgatctcaggtggtccaactgcctcggcctcccaaagtgctgggattacaggcgtgagccaccgcacccagcctttaaaaagtactttttaaaatagttttttattattactaaattccagatgttgcattgctaaacatccgctgtgggcagtggggagcccccaaaggctgcttcctggggtcagggtcaggggtgagcaagggacaacttgggctgcctgtgcctattggtacacatgcctcagcaagtggtcctgacactggcttatttttattaggtgaaaagtgaaagggaccaacattacacaattccacaatactaagaaacacgtgaccacagccagtgtctccagggggtggatacacattggctgtgtccttctgagcggcttccctcagcctgcagtacttggggctcattcgggtacagggcccccgcttgtccagcttaccacacgaatgctgaagcaccatcagggagtgctgccagggagttgagggcaaatttgcttaaaaccagttcaccgctaacaagaaacttgtgtgtctggttccccaggaaagcctaacctttgtgtttccatttccatggcatctgctccccacaatttaaataaggaacagataagacaggtcatcagatatttacatacccatgagaggcatatgaggtgggcaggaagccaggggcatcacagcccagcatctggccccgtcgggaggatgacctggcactgggtgttggagaccaacagggggcatatcatgtgggggctgtcagcagcagcagtctgctggggggtggggacaaggaggggtctgcttggctgggggattaagtatacttgggggtgaaggaggtgggagattgattacacaagcaaaagtactgaggacaacaggagcaggctctcactgttggaggaaggagtcacaaacctgggaagagagaaaaatagtgggaaccctgtggtgaactagaattaaagatattggagtgggccaggtacagtggctcatgcatgtaatcccagcactttgggaggccaaggtgggagtattgcttgagcccaggaggttgaggctgcaatgagctgtgacttcaccactgcattccagcctggtgacagagtgagaccctgtctcaaaaataaaaataagctgggtgcggtggatcacatctctaatcccagcactttgggaggctgaggcgggcaggtcacttgaggtcaggagtttgagacgagtctggccaacatgatgaaaccctgtctctactaaaaatacaaaattagccaggcgtggtggtgcacaccataatcccagctactcagaggctgaggcaggagaaatgcttgaacctgggaggctgagattgcaccactgcactccaggctgggcaacagagtgagaataaataaataaataaataaataaacaaacaaaaataaagatatcataatgaactcatggtttttaatatataaaaacataggaaaacagatgtgaatgtgtgcgcacgtgtgtgtgtgtacacacgcatctgtaataacccacaaatattccttagctctgtgtcctaagagtgtccaagagcagcaacaccccaacagcaatgagcacatcaaaggccaagatttactctgaaaggaatcagggctccttagagaattgggtgaagcaggcagaggcagaacagaatatgagcctggttgggcacagtggctcacacacataatcccagcattttgggaggccaggagtttgagaccagcctgggcaacatgacaaaaccctctctctacaaaaaatacaaaaattagctgggcaacgtggctcgtgcctgtagtcccagctacttgggaggatggggtgtgaggatcacccacccaggaggctgaagtgagccaagattatgtcactgccctccagcctgggtgacagagtgagaccctgtctccaaaaaaaaaaaaaaaaggccaggtgtgatggctcacgcctgtaatcccagcactttgggaggcagacaggcaggcggatcacctgaggtcaggagttcaagaccagcctggccaacatggtgaaaccccatctttaataaaaaatacaaaaaattagctgggtgtggtggcaggcgcctgtaatcccggctactcagaggctgaggcaggagaattgcttgaacctggaaggcggagattgcagtgagccaagatcgtgccattgcactccagcctgggcaataagagtgaaactccatctccaaaaaataaaaataaaaataaatttacactggggagggttagggacatcatgtcctcatagcatttaggcgaaacttaaatgtagatttaaacttgaatttctcctttagtcaccagatctcttctgaaggctgggcaccatgcccacagccttacatatatgaattcacacagccctcaacagtcctcagtaaccatgagctaagtattattattgccccacaaatcagaggaggaccaggaacagagaaaggttcagccaaggaccagggtcatgcagccagaggtggaggcagaattcagaccctcttgctgttctcaactactatatatgtcaagtacacatcaatcttgcaccaaaacagtgttcagaaagaagcacacttttgtacaacatatacacacactttccacaagcctcagcaaatatgaagtgctatgctccaaagtgacacacaaaattcaaataattgacctcaagagaccaactcactctaagaaatcaagtgacacgttgtgcagatgacccttggtttaaatatcttcatcttatttggtggccccacttataagctactttcaaattgttattaaccttgaccaagtgatcaaggtcaatggtagcagtgacaggacatattgacagcatgttttccctgacacaatgtgctgaggacacacacattgcctctgtgggactctggccacagatgcacaacttcagtccaatctagaggaaacatcagacaaaccgcactgagggatgttctacaaaatgactgagcgcttcttaaaatggtcagcgtcattcatggatgacaaggtcacagatcacaggagaccaaagagacatgatgactaaatacaacgtgggattcagggcagaaaagggcattagggcaaaaactggggaactccaaatgaggtctgtagttcagttaaagatcattgtactcagcgtaatttcctggtttccatatttgtactatggctctgaaggtgttgacgagacaggaagcccggagaaggagatacgagaactctctgtactattttttcaacttttctttttcttttctttcctttttttttttttttttgagacggagtcttactcttcttgcccaggctggagtgcaatggcgcgatctcggctcactgcaacctccacctcctgggttcaagtgattctcctgcctcagcctcccaagtagctgggattacaggcatgtgccaccatgcctggctaattttgtatttttagtagagatgggggtttcaccatcttggccaggctggtcttgaacacctgacctcgtgatccacctgcctcggcctcccaaagtactgggactacaggtatgagccactgtgcccagccgacaaaactgttcttattcaatttccctaagtctgtcatttttcctttttctatatgactgaatgctaagcacctcttaggtcttcgacctagaatgcagctgcttgttactgatttgcaacagtatttctcagttataaactacaaaataaatcagtgtgcatactggaaaccagggcaatgataaggcagaaagaaaacatcctagccgtcttctgcgagacagaagggatgagcaaaacggcccaccatgcacataagggctgagacaagatcagaggtgtgctgccgcagctctagtcacacacaggaagtgcctttttttttttttttttttttgagacagaatttcactcttgttgcccaggctggagtgcaatggcgtgatcttggctcaccgcacactcttgttgcccaggctggagtgcaatggcgcgatcttggctcaccgcaacctccacctcccaggttcaagcgattctcctaccttagccccccgagtagctgggattaccggcatgcgtcaccacgcctggctaatttttgtatttttaatagagacagggtttctccatgttggtcaggctggtctggaatccagcctcaggtgatctgcccgcctccgcctcccaatgtgctgggattacaggcatgagccaccacgctcggccagaaagtgtcttctaaacagcctacctgtcttttccttgatctcacagagcacgctgaacagagcaggcttcatccgatggcaattcagagcatgctttctgaaagggaggtgacagaggagggtgtgagaaaagaatagtcatcatcttgtccccaagagtaaagatcttccatactgagaaatcaaaccaaacgagatctgccactctgactgtagataagtcgccttatgaaaatgcagtacaatcatatttcatgtgaatttgatttgcacaaaatcaatataaaggccagccgtggtggctcacgcctgtaatcccagcactttgggaggtcgaggcaggtggatcacttgaggtcaggagtttgagaccagcctggccagcatggtgaaaccctatctctattaaaaatacaaaacttggccaggcacagtggctcatgcctataatcccagaactttgggaggccaaggcaggcggattgcctgaggtcaggagttcgagaccagcctggccagcatggtgaaaccctgtctctactaaaaatacaaaaattagttgggcatggtggtgcccacctgtaatcccagttactcaggaggctgaggcaggagaattgcttagacccgggaggcagaggttgcagtgagccgagatcaggccactgcactccagcctaagtgacagagtgagactccatctcaaaaaaaaaaaaaaaaaaaattcgccaggaacagtgtcatgcacctgtaatcccagctactcaggtgggtgaggcaggagaaatgcttaaaccttggaggcagaggttgcagtgagccaagattgtgccactgtactccagcccaggcaatagagtgagactctgtctcaataataataataataataatgtaaagcaatatacaaatattcaaaacatttcccactatatgcaaaagtttaaacaatgcaaataactcatcaaaaactatggtaaggcattagtggctcatgtctgtaatctcaacgctttgggaggccaaggcaggaggaccacttgagcccagaaatttaagatcggcctgggcaacatggtgagacccattctcttcaaaaatttaaaaattagctgggcatggtggtatgcctgtagtcccaatccctcaggaggctgagacaggaggatggcttgagaccatgagttagaggctgtagtgagctatgaacatgccactgtactccagccagcataacagaggccttgtcattaagaaaaaaaaaaaaaggccagaggcagtggctcatgcctgtaatcccagcactttgggcggccgaggcggatggatcgcctgaggtcaggaatttgagaccagcctggccaacatggtgaaaccccgtctctactaaaagtacaaaaaagctgggcgtggtggtgcacacctgtaatcccagctactcgggaggctgacacaggagaattgcttgaaccagggaggcagaggttgcagtgagctgagatcgcaccagtgaactccagcctgggcaacagagagagactccatctcaaaaaaaaaaaaaaaaaagaaagaaaaaaaaagaactatgaaatatcaaggtccaacaacttgaaatctgtgttcacactatggtcctgcagtggtgtatcctggtgcctaagcagaagcaccaatcatcctcttccagtgtcacttggcaggtgtttactgagtacctactatgtgccacacaccattctggcatcagagacacagacaggtaaggtttttacacatgtggcagttaagagggagggagtgagacaccaaaaatacacaccaacaagaaacccatcagccgtggcagttgctctggggcaactggggtcacatgacagtgatggttagaaggctttttggaatttccatgtctctgaggtgacatcaaagctgagatcagaatgagaaggagaaatcaaccaagaaaaggactggagagaggtatggtttaggcagaagaaacagccaagcacaaaggccctgtgagaacacactgggttcagtactggctgtttgagaccaggctgctgagtgttaggggtgagggagagagctacgagaagttagactggcaagtggagattgactctaagggccttgaaagtcatggggacaactctggcttttgcttgcttgggttgggaactatggttggcaggataatggctcccaaaagggtccacatgcttatcctcagaaccctaaatatggtactttacaaaaaatgggaaaaataattctgccaatgtaattaagtttaaggaccttgagatggagagattaacccggattatctgggggggcctactgtcatcacatgacccttaaaggtagagaacctttcccagatgtgggcagagaaagtcatgatgatgtaagggttggagagatactatgttgctggccttgatcatggaggaagggaccatgagcaaggaatgcaggtggcctcaacaggctggaaaaggcaaggaaccagcccatgggctcactgggcaacaccttgattttagcccactgtgcccatgtgggctttctgacctaccgaaatgtaaaatcggtggctcatgcctgtaattctagcattttgggaggccgaggcaggcagatcgctggagctcaggagtttgagaccagcctgggcaacatggcgagacaatgagctgggacaagaggcacgcaccaacacacctggctaaattctgtatttgttgtagagacagggtctcgttatgttgcccaggctgcgctcagccaagagaagaatttcatggagagaagagtaatctgtgagaaatgctgctgagagatcaagcagaataagaacccagaagagaatctgaggctgggcacggtagctcacgcctgtaatctcagcactatgggaggctgaggtgggaggaccagtctaggcaacatagcaagaacctgtctctaataaataaataaataaatgaataaagagaattcggatttagcaacatgaaggtcataggtgactcagcggagagggaacaaggttgggagagaatgtggaggtgaggaggaagcggaagcagcaatcacaaagtctttgatgtttatcataagggagatcaaacaaacataacaggtgctaaaagacagggtgtgtgttaatcatgttttttttctttttctttttgagacagggtcttactctgttgcccaggctggactgcagtggccatgctgtgcccgaactcaagcaatcctcccgcctcagctcctgagtagctgggactacgggtggtgctaccatgcctggctaatttttaaaaaatgtttttgcagagcttaagtctcactatattgcccaggctgttcttgaactcctagactcaagagatccccccgccttggcccctcaaagtattgggattataggcatgagcctggactattaattatgttttttttttatcttgctttgacattgtggggcttggagtgactgcccttcccagggctagcttattactacagacagcaaacaacttgccaaagaacatgccattcatatgcaaatcaaccaatcaaaagcccacattcccaatcatcttcttcatttaatgctcacacacaaagccaataatttcccagccctaaatcaccccagggccaggtactgaccaactagagaccactcctctagcacagagcctgccaaaattatttaaactatctaacctaagcttgctcaaacttgcctgccatgccatgccatgcccattccttcctgaggaaatcactataaaagttctgggccgtgctttccctctctccactgtcgcccactgacccaggtgcttccccatgtggccctgcctggcatggtgtgccccctcctctggagctgtaagtaataaacttccctttcaacagggcagttgtctccatgtgtgtcatcttaccatacctgattaaaacaaatcccgggtacaaagcaaggccaaagggtaagtcaaaggggttttttttctttttttcttttttttctttttgagacagagtcttactctattgctcaggctggagtgcagtggtgcaatcatggctcactgcaacctccacctcatgggttcaggtgattctcctgcggcctccagagtagctggcattacaggtgcccaccactacacacagctaatttttgtatttttagtagagatggggttttggcatgttggtcagcctcagcctcccaaagtgccaggcttataggcatgagccacggtgcccagcctgttgtctttgactgttcttaaagataggaggtactagcacatgtttatatgccaaaaagccagtctagagagagaatttgatgatgcaaggatagagtaaatggccaggcgcagtggctcacgcctgtaatcccagtactttgggagactgatgtgggcagatcacttgaagtcaggagttcgagaccagcctggccaacatagtgagacaatgtctctgctaaaaatacaaaaattagccgggcatgatggcatgtgcctgtaatcccagctactcaggaggatgaggcaggataatttaattgcttgaacccagggggtggaggttgcagtgagccgagaacacgccactgcatcccagcgagcgagactccatctcaaaaaaaaaaaaaaaaaagaatagggtagctggtatgtgcatgtagcagaacttctgtgaacaactttgatgagtactatgctattaacatttactattatgatgattttaaatcctataactctgtcatccaagcgtccattattaaaagatccattattaaaagccacagctgaataatgtatctgaaaatcaataacttcacaacagaaatcagatttgattaacaccatgagaggttgggcatggtggctcatgcctgtaatcccagcactttgggaggctgagatggggggatcacttgaggtcaggagtttgagaccagcctggccaacatggcaaaatcctgtctctcctaaaaatgccaaaaatttgatgggcatggtggtgtacacctgtaatcccaactacttgctgaggcacaagaattacataaattcaggaggtggaggttgcagcgagacaagatcacatcactgcactcccgtctgggcaacagagcgagattccatctcaaaaaaaaaaaaggaatacaactggggtgcagaactaagatctttgtctctgaacttcaaatataaaatgtttgtgggggatgagatgacatatgaacttcccaaaatctaacctgaacattagtctttctttatttttaatttttatttttgagatggagtctcgctctgtcacccaggctggagtgcagtagcgcgatcttggcttactgcaacctccacctcccaggttcaagtgattctcctgcctcagcctcctgagtagctggaactataggcgcgtgccaccacactcagctaattttttatgtttttagtatagacagggtttcatggtattagccaggatggtctcgatctcctgacctcatgatccacttgcctcggcctcccaaagtgctgggatcacaggtgtgagccaccatgcccggccatgttagtctttcttataaggtatacagtcattgatcacacgagatattcagcttaaaatattaaacattttctttccatagaagtggtattaacattaatttaaatggactctgattatagctcatcttctggaaatttaactttttctctttaaaaaaaatatattttaatataaaaatagaagaaacctggggaacatggtgaaaccccagctctataagaaatacaaaaaactgtcagacacagtggctcacgcctggaatcccagcactttgagaagccaaggcaggtggatcacgaggccaaaagatagagaccatcctggccaacgtggtgaaaccccgtctctactaaaaatacaaaattcagctgggcatggtggcgcgcacctgtagtcccagctactcaggaggctgaggcaggagaatcacttgagcctgggaggtggaggctacagtgagctgagattgcgccacagcactccagcctggtgacagaacaagactctgtctcaaaataataataataataataataataataataacaataataataataatacaaaaagtaaattatctgggtttggtggcacatgcctgtagtcccagctactagggaggctgaggtgggaggatcgcttgaactcaggagatcaaggctgcagtgagctgtgatcacaccactgtactccagcctgggcgacagagtgagaccctgtctcataaataaataaataaataaataaaacagagacgggttctccctatgttgtccagactggtctcaaactcttgggctcaagtaatcctcccactttggcctcacaaagtgttaggattacaggcgtgagccttgtttctggcctggaaacttaattttaacaataagaggaaagaaaatgaagttggctcttctgcttctgtaaaggctctaggatttttttttttttttttttttttaccagttttctccttataaaatattttactttagatacagtagaaagcactttttaatgcatacaaagtaatttcatagtttctgtggcttactatgaaaagaaaacaagttcccaagctttgagcatgtctttgagctagcagtgatcaagcagctgctgcaaatcagtgaggaaaaggggactgactagtgagaccttccccaaggggatgaaatcacttacttggcagacacaccctaaggtaacccccagtgagtcatgtccttatataatcctttttccttgagttcaggaagtacctgtgacttgcaatgtgccaaaggtgatggtatcatctctgccatggttatgttgttatctaagactccaccttagatgactagagagtcacccactggcaccagctgccatgtcatgacagctggtggcaggaactgcaggcagcctctaaagctgagagcagcctcaactgacagccaggaagaaagcagggacctttgtgcttcaactgcaggaagtgaattcttccatcaaccatgcgacactgggagagaaccccatgctctggataggaacatagcccagccaacaccttgactgcagccctgtgagaccctaagcagaggacctagctaagctgtgcccagaatcctgacccaaggaaactgtgagataataaatatctgctgttttaagctgctaggcttgcggtgatttcttataaagcaatagagagttgataatgagatagactggaagccagagaatggggaccgttgggagaaaaatggggttggtgctggtatgtctaacaagtatatgacacgttatggctgggtgccgtggctcatgcccgtaatcccagcactttgggaggctgaagcgggcggatcacctgaggtcaggagttcaaaaccagcctggccaccagcctggccatcatggtgaaaccccgtctgtactaaaaatacaaaaattagccaggcatggtggcacatgcttgtaattccagctacctgggaggctgaggcatgacaatcacttgaaaccaggaggtgaaggttgcagtgagccaagatcgcgccactgaactccaggctgggtgacacagcaagactctgtctcaaaacaaacaaacaaacaaaaaacacaagtatatgacatattctaccaaatccacatatctgaatttttttgtttgtttttgagacagagtcttgctctgttgcccaggctggaatgcagtggcatgatctcagctcactgcaacctctgtctcctaggttcaagcgattcttgtgcctcagcctcccaagtagctgggattacaggtatacgccaccactcctggctaatttttatatttttagtaaaggcggggtttcatcacgttggccagactggtctagaactcctgacttcaagtgatccacccacctcggcctcccaaagtgctgggattataggcgtcagccactgcgcctggccacatatctgagttttttaaaatgctaatgtttatgagaaaaattcgaaaaaaaggaagaacagtaaatcttttaaattgacttccaaggagtcttctaacctaaacaaaaacaaaaaaagcccaaaaccaaaattctgaatatcatttttaaaccaatattcaaaatctatagcaaaacaattgagagtcatatagaaaatgccagaaagtgaaagcatagagctttatcccccttcaacctcatttattcaatatttatgggacaaacatttattgtggaagtaccatatgctggtccttgtataagggctaaggaacatgaaaatgaataaaaacataatccacattctggtatctaccaacagtatgttttagctgataattttagctataatttactttcccaaattatagaacaatctgttttcctcatcaaggtatcattttaaattacttgggaatttcatttaaagatatattcagagatttcagtccctatggaatagaatactacttgaaaaagtcttcctgaaagcaacaatgattctaacaccttaaccaaggatagatcgattatccttgattattctcagttctagaaggattattttagctgacaaaagcagtcagcaatattatacatctcctggagacaaacctaggtacaaacaaaaatttagaacttatgttccctgctcttaagaagtaaaactgcaggccgggcgcggtggctcacgcctgtaatcccagcactttgggaagccgaggcgggcagatcacttgaggtcaggagattgaggccagcctgaccaatatggtgaaacctcgtctctaccaaaaatgcaaaaatgagccaggctgtggtgaccagcgcctgtaatcccagctactcaggaggctatgacaggagaatcgcttgagcctgggaggcggaggttgtggtgagccaagatcgtgccactgcactccagtctaggcaagtgagaccctgtctcaaaaaaaaaaaaaaggaaagaaaactgaactcccacctgggcaacagagtgagactccgtctcaaaaacaaaacaaaacaaaacagaacaaaacaaaccaggacaaataccttagaaaggtcagaatactttgcaaagtacttacactgtacaagtctggaacaaaccgcgtgctcactccttacctggcaaggagttcaaggccatgcttggtcggacagcagctgaggcaggcagtcacccccgagtctcccttccaaggtcacgcccaccactcatgcccgatgggaccacaatgcatgccttcatgctccacgcctgccttgcatgcatgcttgcaccaagcctacaatgccgcatccactttctttgcctaggcaaagcctcaagtccagatcttggccatctcctcaaggctccttgtcccccgcctgacttcacctagactccagagtcatgcactctgattgcccatgctctacaagctctagtcttgctgaagggctaactcctcattgccctctctggtccccgtgtcaccgcactctccaatgtctgcctctccaaataatgaatctcctttcagaactcactgctgcattcccaagcccagcaccagacctggcacaaaatacatgtttattgagtagatgacatttaatttgcgagaatgtacttttaaaagtgtcctgtaaagcccgagcctgactgtctgatctcccacggcacccaatcagctgggctcctctgagcaggaagcgatgtcagatttaagtgagttttgtaggatccctgggaaaagcagagacaggtggcaggcagtacagcctcagagttcaatagagcatgcccaaatctccatccaactaccctccagttatctggccacttgattccttatctagaaacacagtgaagagccaggcgcagtagctcacacctgtaatcccagcactttgggaggctgaggcgggtggatcacctgaggtcaggagttggagaccagcctgaccaacatggagaaaccccgtctctactaaaaatacaaaattagccaggcgtggtggtgcatgcctgtaatcccagctacttgggaggctgaggcaggagaatcgcttgaacccgggaggcggaagttgtggtgagccgaaatcgcgccattgcactccagcctgggcaacaagagcaaaaatccatatgaaaaaaaaaaaaaaaaaagagccaggcgcagtgattcacgcctgtaatcccagcactttggcaggccgaggagggcagatcacgagctcaggagatcgagaccatcctggctcacacggtgaaacccggtctctactaaaaatacaaaaaaattagccgggcgtggtggcgggtgcctgtattcccagctactcgggaggctgaggcaggagaatggcgtgaacccggggggcggagcttgcagtgagccgagattgcgccaccacactccagcctgggcgacacagcgagactccgtctcaaaaaaactaaagaaagaaagaaaaacaaacagtgaaaaaccacccacttcctagggttctggggaggggtaaatgagggaaatccttattgtcatcatcatcaaccactgtgttctgatagaggcactcggtagctgtcatttaaatgagtgagtggtacttgctcctttgtgaaattctacacatggctttacttttcattaataaagctatttcaaaggggattttgccaaaagacttttagatagcttcagggaattgttttaaaactaacacaatttgccaggcacggtggctcacgtctgtaatcccaccactttgggaggctgagacgggcggatcacctgaggttgggagttcgagaccagcctgaacaacatggagaaacctcgtctctactgaaaatacaaaattagctgggtgtggtggcacgtgcctggaatcccagctactcggaaggctgaggcaggagaattgtttgaacccgggaggtggaggttgcggtgagcagagattgtgccattgcactccagcctgggtaacaagagtgaaactccatctcgaaaacaataaaaaatttaaaaaacttacaaaaaaataaaaacaacacaattcaagctgggcaaagtggctcacacctgtaatctcagcactttggggaatccgaggcgggataatcatttgaggtcaggagttcaagaccagcctgcccaacatggtgaaacctcgtttcaactaaaaatatgaaaattagccgggtgtggtggctggcgcatgcatgtaatcctagctaatcaggaggctgaggcatgagaatcacttgaacttgggaggtggaggttgcagtgagccgagattacgccactgcactccagcctgggtgatagagcaagactctgtgtcaaacaacaaaaaccaacacaattcaactcttaggaaaagtacaccaaagacagcaagactcctctggcactagaccaagtcaagctaagcctgcaagcaagctaagaagaaagactacaaggcacgaagtcaactggcatctaattaatctctttagggatactgaaaaagaaaattttaaatatgaaatcctacttcccaggtttggactgatagatcctctcatgctaatgctatctggctctgggaaattccacatcataaattccccctagaacccttgcattctttgaatgggtgtgcggaaggctgaatgctcactgacatgctttataactatgtatgaatataaggtcagaacatacataagtatacatactttataagtatatgtgttctgaccttatattcactattgcaaaagtaccaagcctaggggaacacatttcaggtatcagttcacaccttgcctcttcagtaagtttaaaggatagtcaaaatcacttcattatctccccttcataataggaatttaatccatatctaggcaaagtcaatctgcagaaatattggagggactaagaaagttatgcaaatctctactagttgaggtcataatagtaaaaatcaaattaaaaagagaaggccgggcatggtggctcacacctgtaatcccagcactttgggaggccgaggcgggcagatcatgaggtcaggagttcaagaccagcctggccaagatggtgaaaccccgtctctactaaaaatacaaaaaatagcctggtgcaatggcaggtgcctgtaatcccagctacttgggaggctgaggcaggagaatcacttgaacccagggggcagaggttgcagtgagccgagatcatgccactgcattccagcctgggtgacagggtgagattctgtctcaaaaaaaaaaaaaaaaaaagaaagaaaagttcagagatatgttttcttcctaagaaaacctatgcaggcattgctgggttgcctaaaaccaacttccaaatacatttttggttttaggtatgccatctcacacaccacactgcttgctcctaaaacattataacagtgagcatttagaatgggtgggatggctcatgactgtagtcccagcattttgggaggctgaggcaggaggacagcttgagcccaggagttcaaaaccagcctgggcaacatagtgagactctgtatctacaaaaaaatgttaaggccaggcacagtggctcatgcctgtaatccctgcactttgggaggctgaggcaggcagatcacctgaagccaggagttctagaccagcttggccaacatggtgaaactgtgtctctactaaaaatacaaaaattaagccgggcatggtggtgcatacctgtacacacctgtaatcccaactactcgggaggctgaggcagaattgcttgaacccatgagacgagggttgcagtgaactgagatcgcaccactgtatcccagcgagggcaacagagtgagactctgtctcaagaaaaaaacaaaacaaaacaaaaaacccaggtttgaagagagagctatattttccttctgaaaacaaacttacggcaacaaaacatgttcagagggcctcacgactgagatgaaaaattccttcttgctaaacagttgagttcaactgactgctggggtgataaaaggggtgactggcacattgagagtgggcaggatcagaaagattttcaaaagcctcacaggatcagttgatcagaagagacaatctgcttcccagcccaggttggtaatctaccaggctgcagggtttactgtgaggagctgtatttcctccagaggggtggaaatagcccatttgaggatggatgatttttgtctggacttgagtgaactttagggctttgagttcatctaaaggctaggtccaaagaaatgagggagatttgaagcttcaaagtctcgaaataaaagccccgggggtcatcccaattcagaaagaggccagaaaccaggaaccagctacctaacacctgtgttatcaagcatgaataacgccccccaccacaccatttaatttcttttttttttttctctgtcatccaggctggagtgcagtggcacgatctcggctcactgcaacctccgtctccagggttcaatcggttctcctgcctcagcctcctcagtagctgacacatactacaggtgggcatcatcatgcccagctaatttttgtatttttagtagaggtggggtttctccacgttgcacaggctggtctcgaagtcctgagctcaggtgatcctcctgcctcggcctcccaaagtgctgggattacaggcgtgagccactgcacccagcctaatttcttagccttaaaacaaaaagagctatctttgaaaatggtaaagaagtaactggctggcagggcgtggtggtttatgcctgtaatcccagcactttgggaggccgaggtgggaggatcacctgaggtcaggagtttgagagcagcctggccaacatggcaaaaccccgtctctactaaaaaaataccaaaattagccgggcgtggtggcaggcgcctgtaatcttagctactcgggaggctgaggcaggagaatctcttgaacccaggaggcagaagttgcagtgagccaagaacacgccagagcgagactctgtctcaaaaaaaaaaaaaaaaaaaaaaaaaaaagtaactggctgcattccattctaaatctaaagcctgtctagggaaactagaatctcaggagattgctgcaaggaaaatgcagcagccctggggctgtgctgggcctgaggaaggccacatctgagcagagctcaccccttaagcagcaatatcccggtctggaaagtacaaaagtagcttccaggacacacccaaagctctgcctctgcggtgacattcctgggtgtgtcaaaaccatcttccccctttcccaactcctactaatccctctagaatctcctcagtgtcatgaaactactgaatgcaaggtgctaggcattgatcctggctctgggaacacaaagtataataaagccactgctctccgactagcctaacagacatcacggaaggcaccctctcctggcacagctcttctgtgctaggaattacctctacacagcacattcctgttataacaattatttacaagttggtctcccacacaccctacttctcagtgggctccaagaaggcagagaacatcttagccatcttggtttctctagcacctggtacaatgctccaaaaagaataaaaacactggttcacgtctgtcatcccagcactctgggaggccaagatgggtgaatcacttgagctcaggagttcaagaccagcctggacaacatggtgaaaccccatctccacaaaaaatacaaaaattagccagccattcattggtggtttgaggctgtagtcccagctacttgggagactgaggctggagaatcacttgaacctgggaagcagaggttgtagtgagttgagatcataccacagcactccagcctgggtgacagaataagaccctgtctcaaaaacaaacaaacaaacatggcccggcgcagtggctcacgcctgtaatcccaacactttgagaggccaaggcgggtagatcatctgaggtcgggagtttgagaccagcctggccaacatggtgaaaccccatctctattaaaaatacaaaaaactagccaggtgtggtggtgcacacctgtaatcccagctacttgggaaactgagatgggagaatcacttgaacccgggaggcggaggttgctcactagccgagatcgcgccactgcactccagcctgatcgcgccactgcactccagcctggacaacagagtatgagactccgtctcaaaaaaacccaaaccaaaccaaaaaacagccaaacaaacaaacaaaaacaaacaaacaaacaaaaaaccacaatgaaaacagttggaggagccaggctcagtggctcatgtttgaaatcctcgacctttggaaggctgaggcgggaggatttcttaactcaggagtttgagaccagcctggccaacatagggagacctaaaaaaatagaaagattagtccaggtgtggtggctcagggctgtaatcccagcactttgggaggccgaggtgggtggatcatttgaggtcaggagttcaacaccagcctagccaatacggtgaaaccctgtctctactaaaaatacaaaaaaaaattagccaggcggtagtggcacacgcctgtaatcccagctactcaggaggctgaggcaggagaattgcttgagcctgggaggcagaggttgcagtgagctgagactgcaccactgcactccagtctgggtgacagagtgagaccctgtctccaaaaaaaaaaaaaaaaaaaaaaaaaagaaagattagccaggcgtggtggcacaggcctgtggtcctagctactcaagaagctgaggtgtgaagattgcttgggcccagaaggttgaggctgcagtgagtcatgatgacactactgcactctagcctgggtgacagagcgcggccttatataaaaaaaaaaaagccaaagaaatagttgtatggtgacaaggactctaatttctcaaacagagcatctgaaactacaaaaagtgtcaacattccctgagaagcaaaggaaagaaagtttgaagaacaaatttactttctctccccaaaccatgaacttgagagcaggaagaacttgagagctatgccagaacccagttcagtacccagatattgtaaaggtccgataaatatcggccaaatttgttaaaaattcattgaagaacaggccaggcacagtagttcacgcctgtaatcccagcactttgggaggctgaggtaggcagatcacctaaggtcaggaatttgtgaccagcctggccaacacggtgaaaccccatctctactaaaaatacaaaactagccacgcatggggcgtatgcctgtagtcccggctactcaggaagctgaggcaggagaatcgcttgaacccgggaggcagaggttgcagtgagccgagatagcgccactgcactccagcctgggcaacagagtgagagtccgtcacacacacacacacacaattcattgaagaacaaatgcatgcattatccacctttttatctgcctcttccttcctaggactgctgtttacctggctttgtaacccctccccactacagggctctagtgggtacacagtccacaccaccagaccctagtcccatacccagagaccgtccctcaccttacaacagtccccattcaacaaggcctcatcctccaaaaggacttcagtcctttcctttccttttctgtaataatcactgcaggacccagacacagtgggctgccttgtgaagcagattctacggatcctggctggctgacaagtggtgagtggaggtaaacgggatgggaggtctaaaaactcctttatttttccccattgcaactggaataaatagtccgaactccctattgattgttatccagatgacaaaaacaaaactatttttttatggagacagagtctcactctgtcgcccaggttggaatgcagtggcgcttgaacccaggcacctcctggattcaagtgtttctcctgcctcagcctcccaagtagctgggaccatagacatgcaccaccacgcccagctaattttcgtatttttagtagagatggggttttgccatgttggccaggctggtctcgaactcttgacctcaggtgatctgcccaccttggcctcccaaagtgcagggattacaggtgtcagccactgtgcctggctgaacaaacaaaactctttactgagattcgtaggccccatgtaattgggttccagtctccctttattattattattattttttgttcagacggaatctcgctctgtcgcccaggctggagtgcagtggtgtgatctcggctcactgcagcctccgcctcccaggttccagtgattctcctgcctcagcctcccaagtagttgggattataggtgtgcaccactacacccagctaatttttgtatttttggtagagactgggtttcaccatgttggccaggctggtattgaactcctgacctcgtgattcacctgccttggcctcccaaagtgctgggattacaggcgtgagccaccgcacctggccccagccttcctttaaactcaactctttccctccctggctaggaactttctcttcccagccagactccgctttttacatcctctttcccacctcagggcctctgaaggtgctgtcctctccaaagatgttcttctccacctggcttcctatagcatgcaacccctatccctacagcttttattgccatttattttatttttttcttttctcagattggtacaggatggtctcactatgttgcccaggctggtctcaaactgctggactcaagtgatcctcccactgggaggcagctgggattacctacccatgctaccatgcctggcttatacttttttgcttttgtttgagacagggtctagctctgtcacccaggctggagtgcaatggcttgattcggctcactgcagcctcagcctcctaagtagctgggactacaggcttgcatcatcacacctaactaattttttaattttatttttagtagagacgaggtcttactacattgtccaggttggtctcgaactcctgagctcaagcaatcctcctgcctcagcctcctaaagtgctgtgattagagatgtgagccactccacccagtccttattttttgctatttacattccctcccctaaatcatgtactcgagagcagggactatgtcagcacccggttccctatccagttattgtaaggattcaataaaaatttgctgaattcattaaaaagaaaataggtcttccatctccacccactcctctactaacccttttcccaaaagttctcgatggttcccacaccaagttaccccagttcagttcttcagtctcctgcagacattcctgagtcccattcccagccactcactctccatcatctgccctggaaacttcccacccacaggccgggctcggtggctcgcgcctgtaatcccagcacttagggaggccgagacggaatgagtgcttgaacccaggagtttaagcaactatagcgagacccctgtctctacaaaatatacaaaaaaatcagccgggcgtggttgcacgtgcgcctgtggtcccagctactcgggaggctgaggcaggagaatcaactgagccggggaggtggatgctgcagtgagccatgatcacgccactgcactccagcctgggcgacagagcaagaccgtgtcaaacaacaacaaaaaaacttccagccgcaggagtcccattaacgtacccatttagtcattcactcgtcaaaagtcccgtacgtgcccatttctcagccctactccctaaacccctaaacccaaccttctcgccccaagatgagctgctgaaaatccttcacgccactgctcggccccataaggcctatccagcccgttccgtttgaaccccatacatcccttcgtcctcgggacccccctccagccctcctcaagcgcccctcgtcagtctggcctccacgccccgtcccctcagcccgccaacctcactgccacgaccctgcgtggcccctgccgagcccgcgggcagcacctggcctgtgcctcgtccaggctctggtcggtgatggccatgatctgctgcaggacgtcgctcgtgtcgaggcgccgcggggcggggggcgatggcgcggggcgcggcggggcggccatgagcggcagggccgggcgggcgctgtgagggtgccgtcgagcctggagcactaccactggcgccgcagccaaccgccgctgcctgagcgccgcgcccgctctcgctcgcgcctaagccacgcccaccgccgctatcgccagccaacccgtgtattgcaccgcctacagacacgccccttcatctccgtcagccaaccggcgccacgcaccgcccccgggactcgccccgaacttccccctctccgggcttggactgggtttggggttgccgaggcaacggcacttctcataagcgccctccttccccttgagagagggcagcgctggctccgctccagccagaggcccccatccctcacatctcgcgcggtgcacgcctccttcagccccactcgcatctcctcagagttcctgctcctcctcagggcccccttctcctcaaagccctcggtcctcagagaccctcactccccagagcaccccaactcttcctccaagccaccccctcctcctcagaaccccacacctcttatagcttgatcgacagcccccattcatttccagaagccccaagccccagacccctgctcagtccccctaatgctccctgcatcctcagccccatcaggtgggccactggggcccctggctcttcctctagagctttccacgccccgttcacctggctaaggcggggcgcaggcgtgcgtggttgatggcaacgaggaggtcagaacgcagcgcttttctccactgcagaaatcaattccagtcacctttcaaggtccagctgaagagtgacctcgcttgtttattcatcttcgcagattacagttctgggcatagaaaatgctaccacgtggttaccgaatgaaggaaggatgtttactgagagactcccctgcagtgtaccccaaatcagagcgaatcctcacatctttgtttctagtccttaggacacagcatcgaaggctcctagtgcacaagaaaaggaactgggcggtggctcatgcctgtaatcctagcactttgggcggcagaggcgggaggatcacttgagcacgggagtttgagaccagcttgggcaacatagtgagaccccgtggtggtgcacgcctgtggtcccagctatttgggacttgagaggctgaagtgggaggatcacttgggcctgggaatttgaggctgcagtgagccatgattgcaccactgcactgcagcctggttgacggagaccaggtctcaaaaaaaaaaaaaaaaaaaaaaagtaatggcctggacatgaatctcttctccaaagtcacagaacctcctggagcctatttgctatgaggacagtctccagatgtgggctcagtaaaaggtcctcagcctgctggctgggagcccttccagggtggggcccacgttctctccattgctgctggggaggaaattcaaacaccatctggtatggctggattggagagcgtcgggagactccaaaggggacggcagggagtgaaaaatgaaagacattgaccgagtgtctggacaatagggaaagctctctgatgaaggaaaccgacacttggctccaatgacagaaagtaatagattgcatgggagccacggagaccagtgcctgttcaaaaggtcacccacaagcacagcactgcccaggaggcctgaacagtagtggccttcaggctgggtgcagtggctgacacctatgatcccaacactttgggagtctgaggtgggagattacttgagcccaggagttcaagaccagtctggggaacatagtgagaccccatctctacaaaaataaaaattaaaaaaatagctaaattagctggtcatggtcccagctacttgggaggctgaggcgggaggataagttgggctcaggaggtcgaggctacagtgagctgtgtttgtgccactgcactccagcctgggtgagagagcaaaacctgcccccaaccccaacaaagtagtatccttcagagaacttggaggggtgggcactgaaagcttcagggaccagcagagacaaaaatttgaagccacttggtggagacgggagatcgacaagaggaaatggtctcgaaggagacccacggggtgcaggttaaaacctggaggagctgatgtgaacagccagctcagagcgcctgagacagagttgccttttttttttttttttttttttagacagaaatcttactctgttgcccaggctggagtgtagtggcgtgaccttggctcactgcaacctccacctcctgggttcaagcacttctcctgccttagcctcctcctgagtagcttacaggcacccaccaccacgcccggctaatttttgcatttttagtagaaatgaggtttcaccatgttggccaggctagtttcaaacttctgacctcaggtgatctgcctgcctcggccgcccaaagtgctgggattacaggtatgagccacctcacccgtcccactgttgccatttggaggtcatcaggggtctctactgcatagaaattagttggcagccttggcactcaaagtgctcggccagggccatttaatatagaaggacctgggagttttgggttctttgacaatgcatatttcagtggtttaagaatttggcacaggtggctgggcatggcggctcacatctctgagtgacctgggttcaaattctagctgttattcagcatgggattcaaaagtagggacataaccccacctcctcactggtgaggtgggagcagagaatgacatcctggcacacactgtgccttggagggggcctccctgagcatctcagagggggctcatgatggatctggcactcatgggttgggtgctgtggggtgaggtagggaaagcccagctgagcttgggaccaaccctgggcttcgtgggaatctgaagtccctttcctaggggcctctctggtccctcggggcctgtatgtgccatctccaagctgtgtttaccatgggccagatcacaacctgtctgaatcagtgttctcacataaaaatcagaaagactgatcccagcactttgggaggccaaagcaggcggatcatgaggtcaggagttcaagaccagcctggccaatatggtgaaatcccatctctattaaaatacaaaaaattagccagacatggtggtgcatgcctgtagtcccagctacttgggaggctgaggcagaagaatcgcttgaacctggagggggcggaggttgcagtgagctgagatcatgtgagactctgtctcaaaaaaaaaaaaaaaaaaaaaaggccaggcatggcggctcacgcctatagtcccagcactttgagaggctgaggcgggcggctcacctgaggtcaggagttcgagaccagcctggccaacatggtgaaaccccatctctactaaaaataaaaaatttagctgggtgtggtggcatatccctgtaatcccagctacccgggaggctgatgcaggagaatcacttgaacctgggaggcagaggttgcagtgagctgagatcacgtcattgcagtccagcctgggaaacagagcaagactccgtctcaaaaaaaaaaaaaaaaaaaagcccagcacagtggctcatgcctgtaatcccagcactttgagaggccgaggcgggtggatcacaaggtcgggagttcaagataagcctggccaagatggtgaaaccccatctctaacaaaaatacaaaaattagccgggcacggtggcaggtgcctgtaatcgcaactacttgggaggctgaggcaggagaatcgcttgaaacccgggggcggaggttgcagcgagccgagattgcaccactacactccagcctggaggacagagtgacactccatcacaaaaaaataaaaaatttaaaaaaaaaagcacctaaagtgtttaccagtatgccaggcacatcagaagagcttgagaaatggtcatgctcaaatcctgcatcccactacctgaaccccacaacctgtggctggaagtatgaatacaggtggtggggaatgggatagaaacggctgggcacgtgaccttgaaccatcagggctcaaacaaaagggcagtggggagggagggggctcatagggtccagacactactctgagctgcagagaaagacagggagacaggcagtgagatggaggcagagcaacagatgggggaaacaaagaacagaagcagagagaaacagattcaagaccccagtaagagagaggggccaggcgtggtggctcatgcctataatcccagcactttgggaggccaaggtgggtaggtggatcgcttgaggtcaagagttcgagaccagcctgactaacatggtgggaccccatctctactaaaaatataaagattagtcaggcacgcggtagctcacacctgtaatcccagtactttgggaagctgaggtgggtggatcattcaaggtcaggagtttgagacgagcctggccaacattggtgaaacctcatctctactataatacaaaaattagccgagtgtagtggcagatgcctataacccagctattcgggaagctgaggcaggagaatcgcttgaacccaggaggcagaagttgcagtaacctgagatcaagccactgcactccagcctgggtgacagagcgagactccctctcaaagataaacaaacaaataaataaataataaaaataaaaatacagagattagctggacgtggtggcacgcgcctgtaatcccagcttctcctgaggcacaagaatctggaacctgggaggtagaagttgcagcgagctgagattgtgctactgctctccagcctgggctacaaagtgagactctgtctaaaaaaaaaaaaaaaaaaaaagagagagatggaataacagccagccagactgaagaagagcgagcacagggccaaggagataccatgttgaaagatcctttctggacttgggccaaggtagacaattccgggacacagggacagaaacactgaattgataacaacaaatgttttggagacctcagagtgtaaagaaaggtttactccttgtatcatcccctccccgtggactgcttcaattctatcggggacaggccagtccctggaggctgcaaggagccacaaacctttcccagctcacactctgcacccctcagtctctgctgctaaagaatcagactcaggtagatggggtgtccacagtctgtcctcattacccagtcataccgggtagcatggcccgagagagcccttatctctccccaccttaaaaccctcagcatcacacagcaggaaccagtccacagggcttaccaaggatacgcagtgaaaacagaataatgtctgttacaaaccccctaaacctgagatggctgaagagccagattcctgcaccccatctgactcccccaggcagtgggagatgacccaaagcccccattccctgggcagagtggtgtgcctggggaggcctggcagtggtgctgtgccatgccagaccttgtcctgccagtcagtcagtcctgttggttgggttgagccaggagcacccacaagtcatcaggggctgtggatttgttgcttgccgcgtaccgctgaagttcaaggtagctaaagggtggagtccatcagtgggtggccgttctcgggaagcatgatgcgagtgctggcacctccctgggcagaggatgtatagtggacagactcgcgggtggactggcggaggcacgcgcagcagagaaggcggcggaaggtgcggcgcatctcagcatctcggcaagagtacacagcagcattgaccagggagttggcctcggccaacagtaggaagtacttttctacagccaggacattgcaggactcacagcctaaaccatccaggagcagtaccacctggcctggtgtccagcagaccacgaacgcccctgtgggacagaggcggaagtgagcagggcaagctgtcagaggcccggcacctacagctctcagtttggggttggagtggtctccagagctcgagcaatagtggtgaagtttgcagtgcaagagctgcttgtttccctgattctgcagtgtgacaggaaggcctgctaagatgggacatctatgctaattggtacacagtggccaaggcactggacattttgtgtgtgtgtgtgtgtgtgtgtgtgtgtgtgtgtgtgtgtgtgagatggagtctcgctctgtcgccaggctagagtgcagtggtacaatcttggcttgctgcaacctctgcctcccaggttcaagcaattcccccacctcagcctcccaagtagctgggactacaggtgtgtgccaccatgcccggctatatttttttttttttgtattttagtagagatggggtttcaccatgttggccaggatggtctcgatctcctgacctcgtgatccgcccgcctcagcctcccgaagtgttgggattacaggcatgagccactgcgcctggcctgtgtgtttttttttgagacagggtctccttctgtcacctaggctggagtgcagtggcacgatcacacctcactgaagcggcacgatcacacctcactgcagcatttgacaggctgaggcaggacaatcacttgaggccaggagtttaagaccagcctaggcaatatagtgagacctcgtttctacaaaaaataaaaaattagccaggtatggtggcacatgcctgtagtcccagctactcaggaaactgaggcgggaggatcacctgagcccggaaggttgaggctgcagtgagctatgatggagccattgtaatccagcctaggcaagagtaagatcctgtatcttaaaaacaaaaataaattttgaaatttaaaaatatgggccgggcgtggtggctcatgcttgtaatcccagcactttgggaggccaaggcgggtggatcacgaggtcaagacatcgagaccatcctggccaacatagtgaaacctggtctctactaaaaatagaaaaattagccaggcatagtggcacgcacctgtagtcccagctactcaggaggctgaggcaggagaaccacttgaacctgggaggcagaagttgcagtgagccgagattgcgccactgcactccagcctgggtgacagagcgagactctgtctcaaaaaaaaaaaaaaaaaattaaaaatacatatagattaaaaaacaatttaaaggctttttgttaaaacaggcttagcactgctaaaaactccttttttttttttttttctgagacagagttctggagtttcgctcttgttgcccaggctggagtgcaatggtgtgatctcggctcaccacaacctccgcctcctgggttcaagcaattctcctgcctcaggctcccgagtagctgggattacaggcacacaccaccatacctggctaattttgcatttttagtagagatggggtttctccatgttggtcaggctggtcgtgaactcccaacctcagctgatctgcccgcctcggcctcccaaagtgctgggattacaggcgtgagccactgtgcccggctagcactgctaaaaactcttaaggggttcccatgaaactcaaaataagactcctgtccgtgccccttaaggccttgctgatctctcctcctcacaagcccactttcctctttagaggctctggcctcgtactgccttgaggtttttactttccgtttcctctgcctggaaggctctctgttcctatcctcagcattcaggcctctgctcacatacattatcacctccttggaggacattccccacctaaatcatcccccatcaccctctatcaggtagcttgttttgttcattgcttcgcagtgtcttgtgggagatagggggaagcagggtccctgttgccccctgggggccccacttacccaggatgatgacaacagtcttgaccaggctgagcgtggtctctcggtagcgggggtggcagctgacatgctctgccatgcgctgcactcgccgccgcacgtagaagaaaatgcgggtgtacacagccaccatgagcaggaagacaagcaggctcgacagagcccagacggccaaataggagcggctgagcaggggtgccatgcgtgagcagcggtccagggcacagaggcagtgccaggagtgggcaggcagcagccccaggcccagggcagccacccacacgcccacaatgagcatgaccacgcggccacggggcaggcggctgtgcagctgcacggccatcacactgcggtgccgctccacggcgatggccagcagtgtggccaccgacgcagtgaggcttgtgtccagcaagccctgccgcaggaaccagccctcaagtgaaagtcgggctgtgcggggaccagtgtggaacatgaggaagaggtaggccacgcccgcgaagaggtcagccgcggccagattgccgagcaggtagtagatgggctggtggaagcggcggttggaggcgatggctgctatgaccagcagattggtcagcagcaccagcacgctgacggtcagccccagtgccaccacgaccacatccttgggccgccagtgggagctgagctctttgccactgttgttatagaagaagccgatggtctcgttgtagtagcactggcccatgatgaccatctggggacacaagagatcagtgcatgtggcacttcttggaaggacacagggaggggcggcagctgcagaggagggtcagcgcaggaaggacaagggtctcaaattcagatacctcgaagcaaagtggcagtggtgaggactacggtggcctggaaaaagcaagctccatggggctggggtggaggtggaggagcagctgtttcttacctactaataagacctgtgtgcaagacatcacccaagtcaataggtttttgaaccagaagtgaaacaaaacccatctatggtcgaatcccagcccacctgccgccaatgtgtgacccggtttgggttgtggggagaggagggttagggaaagacaaaggggtgtgagctgcgggaagagatgagggaggatcactttggtgccggagtcagtgtagggagcagagacccgggagcgtgtgcacacaagggtgaggtcacttgctagaaccctgcgagggggcggtgccgaggcgtggaggtgatcggagtggacagagaggcggccccagaagttagtcggcgggatttgggcgcgagtgcttcccaagcgggcggggcaataggctgttccgggtgggacggaggacactggcggtctccgggacaaagacagcggttggggaagggatggatggccgggcctccaggcgtctccagactggggaaggggtagggggttaagggatcagagggcggcgtcctggccccgcaggcacgtgccgcgcccttcccccgggcccaggcccgcacccgcccgcctcccgtccgtgcaggcctcacctgggcctccagtcacgccgcagacaaggcgggctcgcgggggttcggggcgggctcgaggcccatggcccggcgactgcggcgggagcggtagagcgtccgggtgcgccctgtgcgggttgctgagagggcgcgggaggcggggtctccccggcgccccgcccccaccacctgggggagccctgccccgccccgccacctgggggagccccgcctccacggccgcgtcgggggcggtgtcgcccggaaccgcagcccccctgtttcctccccgcctcgcggcccctcagtcgcccctatttccggcgcgggacccccaccccggtacctgcacacctcatgcgcccgcagtttcgagcctgcggggctgagtcactcggcgacccgaaaattcccgccgtgaccccgcgctgcccgggcggagctccaggtggtcttgggtccgcgcccccgctccggacccccaaccctcccagccccaccccgctctcttcttcgtgtccaatcggccgccgagttacaagccactccctgatccgacttggctcccaccgcccggacccccgcccagcttcggctttgccagctcgcagtatcagcgagccgcggcctcctgtgcgaggcccacctctgcggccccagctgatcatcgggcgcacgctagggttttgcaatcccgcccccgtacccctcaccctgggacagcgctgccccctgcaaagcccggccctgccctgccctgccctgtggcttcctccctcggcctccctgcggcggccccgggctcccacggtccggagcacacagccccattgtcccggttatcggtactttgttatactgtatttgattatgcaggaccggatcggggacgcagagctccgggagggccgggctggcgtgactcagccgggtgctgcgacccagctccaactgcctttacgtaggtgctgcagggtgtttgatgatgcaagaaggaggccttgaggccgggcgcagtggctcacgcctgtaatccctgcattttgggaggccgatgcgggacgatcacgagatcaggagatcgagaccatcctggccaacatgctgaaaccccgtctctactaaaaatacaaaaaaattagccgggcatggtggcaggcgcctgtagtcccagctactcgggaggctgaggcaggagaatcgcttgaacccgggaggtggaggttgcagtgagcggagatcgtgccactgcactccaacctggagacagagcaaaactccgtctcaaaaaaaaaaaaaaaaaaaaaaaaaaaagaggccttgattcccctaatctgtaaaatgggggcaaggagtgctacccatgctggcctctcccctagcagagatgcacccaagggcatataggacacagtttattagaggccatcagacctcaggcaccaccagcatgtggagtctgagctgcccacctcctccaggaaggtcacttcgagtccgtgaaggaggcaggcaggtgtgggggagtgaccacaaccaaagtagcaaaagcacccctgtcccaggtgtcagagactagggtggaccccaaggatctcataacctgcactgaccctgagtattgaccctgagtgacctctgagcccgagtggccctgatgcttggcagtgacctgtgtctagtggggggactctgggacattatccccaaaagggttttaggcctcccctaggtcatgtattaaatagtttttccttataggaaccctctggacctctcccagcattgaactcctggcggggtgtttggccactaggtggtgggaggtagggatatatgggtccgtcttcacaatctgggcctcttccttatttaaggtgccagggtggtcagagatggtcctcggcttcctcaggctggacgtccgggcagcaggtggccctgggcacagcctcgctgtccaatttcgagagtagccgggctgtctcctgggtaatctcaaaatgcttgggcagcggggtgcggcgcagggggctgccctcaggggaggcagctgcagggctgggcccccgcccccgcaaactccctctgggcactgatgtgatgggggtctcctcgcacagcttggaagccaccagggccagactggacagctggtgggttacaggcctcacaccgccccggggatacttcactggctggcggctgaagtggccacgagactgtgtccccaggagtgagtcctctgggccttggctggacactgtgtacggggtgggtggtcagtgcagagcacctccaagttctctgtatatccccccaggagtcatcttttagcaagccaccctggggccagggcacccccagaactcctgagcctctctctaacatactcaccttcccctcccccatctttggtgtcttcagccacgtcctctctctggtcactctgtggagttggaatctgcagggagaaacccaagaatgagaccccaacactaaaatcccagttctttgagattcctggagagccaagggcttgttcctggacatgcaaaaggaatagccagtgcaaaggccctgaggtaggagcatgcctggtatgttaggacgcagccccaccctgtaatgaatgagggaaaggtggtaggaagtgagaccaaagaggagtgggcccaggtggctctgccagccacccctgactttgcacctactctgcactgggtgtggactaccattgaactcctcctatgcacagggcatggaccaccactgactgtgcacctgtcatcctttgcagttttggtgtttggggatagacgatgcccttataagtgtactgcttggccaggcatggtggtgcatgcctgtaatcccagcactttgggaggctgaggttggtggattatctgaggtcaggagttcgggaccagcctggccaacatggtgaaactccgtctctactagaaatacaaaatttagccgggcgtggtggtgcatgcctgtaatcccagctactagggaggctgaggcaggagaatcgcttggacctgggaggtggagattgcagtgagctcagatcatgcccctgcactccagtctgggtgacagaatgagactccgtctcaaaaataataataagtgtactgcttgcccttccagcatagagcagtgtcattcattgagtctggaccgtgggctccatgagggtgggaaaatccttgtttagcaaatggccagcccagggagtggctcagccctctccacattaggaccaggtggtgcctctgaactactatcctgggctgctctctgcaaccttaccaactttactgttccatccttagctaaatggttggcagtgtctacacatcagacactgtcccgagcactttatgaggcattccagctctcagagacccacagttcaccagcagccgcttcccagctctgggctgctgcaggagagatccttgctctcaggaatggcagatgcagcaagataccagcagcacaggccttgggcatggactgttctagcaatccggagcagcgggtgctgctatcttcctggttcacagctgagctctggatccagactggtgacctttgttaaagattctacgccaggcggccgggtgcagtggctccagcctgtaatcccagcactttgggaggccgaggcgggtggatcacaaggtcaggagatcgagaccatcctggctaacacggtgaaaccccgtctctactaaaaatacaaaaaaattagccgggtgtggtggcgggtgcctgtagtcccagctacttgggaggctgaggcaggagaatgacgtgaacctgggaggcagagcttgcagtgagccaagatggcaccactgcactctagcctgggtgacagagcgagactccatctcaaaaaaaaaaaaaagattctaggccgggtgcagtggctcatgcctgtaatcccagcactttgggaggctgaggagggcggatcgcctgaggtcaggagtttgagaccagcctgaccaacatggagaaacccctactctactaaaaatacaaaaaaaattagctgggtgtggtggtgcatgcctgtaatcccaactactctggaggctgaggcaggagaatcgcttgaatccaggaggtggaggttacggtgaacagagatcacgccatcgcactccaacctgggcaacaagaatgaaactccgtctaaaaaaataaaggattccaactgcggccgggtgtggtggctcacgcctataatcccagcactttgggaggctgaggtgggtgggttacttgaggtagggggttggagaccagcctggctaacatggcgaaaccttgtctctgaggcattagaattgcttgaacccgggaggcggaggttgtggtgagccgagatcgcaccactgcactccagttgggcaacacagtgagattctgtctccaaaaaaaaataaaagattccaactgcttacagtccccttttagggccattaactgctcagagccttcattgtttaatctgtaaatgattttcattaacactgtctacctctcaggactgtggagaggacaacaggaagcctctatagtgtcccctgcacagcaggtgcacattcagtggtggtctgtgcctgtgaatagcagatgcaaggtcaggatagctggcagagccacctgggcccactcctctttggtatcacttcataccaccttcctgtcattcattacaggatggggctgcgtcctaacacaccaggcacgatcctacctcagggcctttgcactggctgttccctttgcctggaacacccttcacctgatctccatgttgccagctcactccttcatgtccttccagtctttgctcaagtccgtctgctctctaagacgtgcccccaccatcctacttagtgatacaaactccacctcccaccgtgctgctccctggtgtcatgtgtcttactccactttttttttttttttttgaaacaaagtcttgctctattgtccaggctggagtgcagtggcatgctctcggctcactaaaacctctgcttcctgggctcaagcgattctcctgcctcagcctcctgagtagctgggattacaggtacacaccaccacacctggctaatttttgtatttttagtagagacaggtttctccttattggttggattagtctcgaactcctgacctcaggtgatttgcctgccccagcatcccaaagtgctgggattacaggcgtgtgccaccgcgcccagccattactctaccttttcatgatccattacccttatcatcatcacctcatcacattccagataactgactttgtgtcatgtatatggttgttctttccccactaaaacacaggcactgagagggcagggtctttggatatttagctcctggatgtatctgcaatgcctacgacaatgcttggcccaaaatacatgttcaataaatattctgttggaggaatgaatgatcacccatgttagtacctctgcagggctgtccccttttgttacatcatcactgcccactgctcattcctcactattccttccagaatgaacataagttaaatgaggaagggaggaagagaatgaaggaaattttaaaaaggaaggaaggtgaaagagaaggtaagagaattgaacagagataaggccctctccatagctgtgggcccagtgggttcttacctcggtaggtgtggccgtgggatgctgctccagggtactgtggtgctgggggtctgggccggggtctgaggctaggactgggggctgggagtctgggtcaaggtgcgggggtggcggttgggagctggttgtgaggggcccaggggctgggctggagtcttggggcgggggctcagtggcctgggggagctcatccatcccaaagatctgctcgtagtgcacgatgaggaactccacaagctgggcctgatgcccagagtccagcaggcaggtgacagggatggcgctggctgcccgcgggccgtccggcggccgcagcagtgtcggcccaaacacaatgcccaggttgttggcagacatcttgttttccataaatcgtgcagccaccctggggatggtgtgaagagaaaggtcagggtacaggatgcaagctcattggtctgagggtaagggtgggacacgcaggccagcctagaggtgacttgcccatgtcacaggtgtaagtcgtctgagaccagcagccacatatccagaactggaggtcaggggtcagtacccaaagttatgaatcatggattaaggttcagagttcagaaaacacaggtcaaaggtcagaggtcagtgtcaggggtcagccagggaagttagtagtcgcatgtccagggaaaagggtcgcgtttcaaggctcagggacccatgcacacctgaacagatgggccaccaggtgccgcagggtgttgtagttagagtcaggcagctgtaccaagagggtcttcagcgagcggataacctcagggctggggctgggggtcccagggtcgtccccagggtctgcatgcaaggtcttagccagagagatgaaggcgtcgtagaggtggaaggggatcacgggctcggtgagctgggggtggaacggagggcgcaacacgagtgtgggtgggctgtggagggctcctgcccgcgtccccctcagtgtcctgagcaccaacctcctgaagaaatcgcttgaggacactcgagacgtcatgaggcgagttccccgacagctccaccaacgctcggccattctcgaaagcctggcacagccgctccacacggacccgggacccgctgacccggtaaatgccctgcagggtgagggtgaaaaacagacacctggttcgtgataggccatcgattcggtcaggtcacttctggggatgatgaagggtcagggcagcacctgcacatccagggcacggtgttctatctcagccgtgcacttcgtgaccacaaagggtacctcctccgggaagtccctgggtagctgcaggaagtcaaccccaaaaaggggtgtccgggctgggagccgcctgtgtccacagaggatcaggagagtctccaggcagcgcttgtggcaggtcagaaagcactgtggggaaggtcacagggacagggaggtcattagggaccagtaggggaagagaaggttacaaggatcctcaaggaatgggggctcatgggagacatcaggttagggtgggtcccaggggcagaaaggctgtaggaatctcaggtcagggagatgatcaagggtcagcaaaggtcatttggtcattaacccaggccacacctcctcacactccgtcccgctgaccatgaaggcttcgcactcgcggcacttggctgggccccgcagtcgccgcagctggtgggtctgagccgcgctggacagtgtccacttcccgaaggggctgcccagcccattctccagcccgtctcccaggtctgcagggagacagggtcaggagtgcctggtgccctgccctgtcccatcctgacctaccctgcttcagcctcaccagggtctcgctcctcaaagtcatctgaggactcagtgcctgtggacgaagccttcaccagctgcctcgtgccagcgcctggggtcagaggaatcatgggagattcctgggctatgggaggcactcctggtttttagggcttccagaaccacccactaattcccaaggggtcagaggtcaggagggggattggacaggtcagtggttaagggttggagaattgggtcagcaacctgaggggggtggttcataagctggatcaagaggttgaggaaataggccgggcgcagtggctcacacctgtaatcccagcactttgggaagctgaggcaggaggatcacatgaggcaaggagtttgacaccagcctggccaacatggcaaaaccttgtctctactaaaaatacaaacattaaccaggcatggtggcaggcacctgtagtcccagctactcgggaggctgaggcacgagaatcgcttgaacctgggaggcggaggttgcagtgagccaagatcgtaccactgcgctccagcctgggcaacagagcaagactctgtctcaaaaaaaaaaaaaagaaagaaagaaaagaaaagaaaaggccgggcgtggtggcacacacctgtaatccctgcactttgggagaccgaggcaggtggatcacctgaggtcaggagttcgagatcagcctggccaacatggtgaaaccccgtctctactaaaaaatacaaaaatcagccggcgtggtagtgcacacctgtaatcccagctactccagaggctgagacaggagaatcgcttgaatctgggaggtggaggttgcagtgagccgagatcacgccactgcactccaggctgggcgacagaatgagactgtctcaaataaacaaacaaataaataaataaataatttttaaaaaggtaaaaaaagaggttgaggaaataggtcaggggtgtggggtaggtcagaggtcaaagatagttaaagattgagggtcagagcttggccaggggctggaggatggtcacaggtggagtgtgggtcaggaccaggtcctatccctacctgggctggaagtgggtgagtccagggaccgagactcgctgccgccacccacgctgtccacatcgctgcccggagtggggcctggagtccctaggtggcacaggtcaataaggatggtcccctgctcacaaaccccactcctgcagcccacctatgtgttggtggaacgaactcctggcaccactcccacctggccctcattgcactcaccttgccagcgccagcctgtgcccggatcctcccaagggcctggctcagctgaattctcatccagccttggaggaagaggcccagagagcttctttctgatgtccagaggggagctgagaagacagaagtttgaaggtttgaatcccaggaaactggcctggggtgatggcacccaggcatcatgtctaggtaccaactccaagcacttgggtctgcaaaccctgacacccagggcattgtggcccctgaaatacagtagccccacattcctgcccctgcccctaggactgggacaacccattcaccctcctatggcccccgagagcctggagtactaaattccactaaggctttgcgttctctaacctcgagtaaccagcctgcggtgccaacagcctggcatcgcgattccggggctcgttcccgactccctgctccagtgacccacctgttcaaggagggaaggaactcctggaaggagaaggcgggcggcgggggcggcggggcctcgggccgcagcgcccgtacaaactcctggtagcgctggcccggctcaaagggcgcacagcactcggccagggcggcgaaggcgcgggggccacgctctgcctgcgccccccgcagcccgaagagactcagcgtcacctgccgggtggagacagcaggttggggaggggcggagcctgggagcctgggggcagggccagagctggggcggggcttgagagacgcgaacgtggtcagggtttgggacgcacctgggcggcttaggaactagggcagtcggccaggggacccaggcatggtcagagcaggggctggtcatccaggggacaggacctcatggggcggagccgagacagtgggtctgggggcgggaactggctgtcgagggaaatggcctagtcctggtgtctccagggtggcttaggggcgaggagtggggcactcagtcggggccccaacggggtgaggggaggatggccttggggatgggcctcacccgcctcagcacttcatccccctgaaacaccagcttgcgcacgtgcgacacgattcgctgcttggcgatctccaggtcctgctgccgcgcgttggcctcgcggacacaggcctggtacagcgcctcggcctcctgcgcctggggaaacgggaggccaggagcggggtggggcgcgtgtgggcgagagtggagggcagggggcgccacagcgctacaggggctcggggccgggtgcccaccttggcctgggcctcctctcgcgagcgccgccgccgctcctgctgcttgctaggtcccggcgaggcctggggggccgagtcctcaggggacccctgggagcgtgcccgcaggtcctcgctgcgttgcacatactgcagctgggcgcgccgcagtgcctgcaccgcctcattctgggggatgatgagaaggtcagcgtcccggcctctctctcaccctacccttccaccaattccaagcctcaccatccgcttctgctccttcatccactgctccttgaactccttccgccacttctcaatctcagtccgtttggcggcgaggggctggcaagggttggggatggggatggagacgctgccttagggccaacccagaagcagccacccagtccttccattcctgcgccatgtgctttgccacctctggactctatttttttttttttcgagacggagttttgctcttgttgcccaggttggagtgcaagtgggcaatcatggctcactgcagcattgaacttgaactcttgagttcaagcaatcctccagcctcagcctctcagtagctaggactacaggcatgtgcactaggcctagttaatttaaaaaacaatttcttctttttttttttttttttggttggccaggtgtagtggctcatgcctttaatcccagcacttgggaggccaaagtgggcagatcacctgaggccaggagttcaagaccagcctgaccaacatggtgaaaccccgtctctacaaaaatacaaaaattataaagatgtgatggcacactcctatagtcccacctactcgggaggctgaggcaggagaatcacttgaacccgggaggcagaggttgcagtgagctgagatcatgccactgcactccagcctggatgataaagtgagactctgtctcaaaaaaaaaaataaataaataaattttttttggtagataaagacagggatctcactatgttgcccaggttagtctcgaactcctggcctcaagcaatcctccaccctcagcctcctagtagctagcactgcagacatgtgcaccaggcccagctaattaaaaaactttttttttttttttgtagagacagggggtctcactatgttgcccaggttggtctcaaactcctgggctcaagcaatcctccctccttggcccccagaagtgctgggattacaggcatgagccaccgtgccaggctggacccttttctgagtcagtattctcctcctggggtcttctccagacctgctctccccgacccctgagtccagaagtctcatgtagtcaccccatcctttctgcttggaagcagagacaccaaggctttcctcctgagaacactcagcacctcgttcccctccccacaaacaaaaacgaagtttttggctgggcgtggtggctcacgcctgtaatcccaccactttgggaagctgaggtaggtggattacctgaggtcaggagttggagaccagcctggccaacatggtgaaaccccatctgtactaaaaatacaaaaattagccgggcgtggtggcaggcgcctgtaatcccagctactcaggaggctgaggcaagtgaattgcttgaacccaagaagcggaggttgcagtgagctgagatcgcaccattgcaccccagcctgggcaaaagagcaagatattctgtctcaagaaaaaaagtaaagtgaagttttgcaattgcacaggaagcccagcttgaatctttgctgggtaaccttgggcaagttcccaagcatccccgggcctcagcttcctcatcaatgaaatggcgacgttggtagtggtgccttcctcccagcttgctgggaaacgaggggatcaggcctgaaggacagcaggatagcagggtgacctctgtaacattccaccctgcccccctcacctggtagtagtctcttttctgctgggccactgtctccatggccagggttcccaggctgagatcgtgctccagaaacagggtgtagatgtactgcagaggcatgtggctctggggaagacagagtggtgtaggaggatactgaagatctgtgggggacaaaggtggggttctagggggcttgggctctccgggggggtctggtcatgactacctgctgttgaatggacaccttgccagcttcagcgatcttcatggtgctcttagcaaactccagctctgggggaagagagagccgggctctgggtctagctggggtctggggactgcctggtaactggggctgggcggaagaggtcctcaccatagctggctctcttttcagtccaggcaagcagttccttggcatagcggctccaggtcttggcatattccagggctgcgtccacacccccctttgtccgaatgagccgcaagtccagttcctcccctggggaagatggatggacctctgacctttgcaccctagtctgctatggatgtcttccctaagcccccagaccagcccagtggcacctgtcctacagcctcacagctccccaaacactactttgggatcacttgtcctggttgcaattttacagattcactgttttttgttttttattttttattattttattatttatttatttatttttgagactgtgtttcgctcttgttgcccaggctagagtgcaatggcgcgattttggctcaccaaaacctctgcctcccgggttcaagcgattctcctgcctcagcctcctgagtagctgggattacaggcatgcgccaccatgcccggctaattttttgtatttttagtagagacgaggtttctctatgttggtcaggctggtctcgaactcccaatctcaggtgatctgcccgcctcggcctcccaaagtgctgggattacaggcatgagccaccgtgcccggcctgtgtttgatgggtttttttatttttatttttgaggcggagtctcgctctgtcgctcaggctggagtgcaatggccctattttgcctcactgcaagctccgcctcctgggttcccgccattctcctgcctcagcctcccgagtatctgggactacaggcactcgccactgcgcccggctaaatttttttgtatttttagtagagatggggtttcaccatgttagccaggatggtctcgatctcctgacctcgtggtccacccgcctcagcctccaaagtgctgggattacaggcgtgagccactgcgtccggccttgtgtttgatttttttggacatggtcttgctctgtcatccaggctggagtgcagtggcacaatcgtatctcactgcagcctcaaagtcctgggcttaatcagtcctccagcctcagcttccaaagtagctgggactacaggcacacaccaccacacccagctaattaaaaaaatattttttcttttggtagggatggtgtcttactgttgcccagcatggtcacgaattcctggcttcaagtgatcctcctacctcagcctccaccctgcctggggtctccctgagggctgggactgagatctgttgtgtgtactgccatattcccaaaacctaaacgatgccttgcatggaacaggggatcagtggtgatttgttgaaggaaagactcctgtctgtccccactgtcctggcctccagacccccctacctgtgaggggtacaggaccctctggggaggggccgctccaacagctggcttcgttggtctgtgcgggagggagacagtattcagaagcaaacagggcaggggcctggccttcctaaggccccctctgcttgaggtcttcctccctgttcccctactccccactcacaacagtggctgtaggggtcttgtcaggttctgggtcttctgagagtagagggtctccagccagcatctcaagggtcctgggggataaaggtgtgtcaggatgccaccttacacccagtctgtcctgccaaggggtgctggggaccttagggttgtttgtggcaaacatcacctctgtggcatctcttgtgtctgggaggtctgaagaatggtgttttgggggaatcaggtgagttttttttaaataggacttgaaaaagcatctgaagggccccagataactttgaggttcatagagtgggattatagggatcgcaaatattttaaggggttacaaggatatgtaggggttctaggaccactttggggatttccagtctatttagggggacacttttaggataccgaggcattttggagggtcccatcctagacttctctggttattaggtatgtaggtccagatgttacaggttccaaatgggactgcaaggcacctaaatggttaggggcttggggcatcttggcaggatttgggggtgatccaggctcagactcacacgttccccagtgagatttcgaggttgtccaggctccggaagatgtcactgtacctcttcctgccctcaggacctggggggagtcctaggggaggggagtgtaatacatgggctaaccactgcctccctccacccacggcacctcaaccagtctcatttggagggggtggaagagaaagggaagagtgagagagagaaagagagggctggggggggcttggttggggccaactcgaggcaggcagatggactcacacaccaccagagaccagagacagctgctcggggaacagagacacccactccctgggtctgcctgcacccagaagcaaaccaacaaaacagatgccccagatgcaaccaggctgtcccgagaagaaagccggtctgacaatggaaccacgggctagacagatggaaatacacaagggacagccaggcagagcctggggcagaaacacacatggagagactgaagccgtgagggacataaagaccgaatgacactccacatacacaacacagacacaaagacggccggaaacaccaagtcggaccccgccacatttctactgctgcccccctgccccctctcctaaggggcctagaccagcactgccgactccccagggctacagaggggccctgtggggatcctaccgcgttgccctctccctcagcagtcgtggcaccctgcccccatcacaaaaatcagaagcagaagcagtcacttccccttcctgggccccctcccccaggcgtctggggtgagggatcaaaagggggagggggagtgaagggctggggtcctgaacccatccgggcacagggctccccacaatggaggatccctgggtccttcccattcaggaactcctctcctggctctcaggacggagcgggacaagtgtgtgccctcaatgtaggaagcaggggatggtcgggggaggcccctcccggatccccgaccccctacccggctctgctgcgtccatatctgggcccggggatcgctctgcagggaccgggatggggatggggtcgcgcgccggcggggccgagccccgatttcctgccgccgcagccgccgccgccgcctcggttccgcgtcgccctgcccagcggaggccacgcccccgcatcagaccacgcccccgtagcccggaagccttgatagtgcccttctctacctgagccgcttgaaactgggtcgggccagggccccctgagcgaccactcgaggctgcagtgcccctgacctgggcatcctaagacttcatctgggccataggttccctctcagatctttgtgctaccccaaatcccacggagccccagccccctcctccctgaatggttgcagagtccacctgtcccggggggcctctcccaggagctcccacaacccgcgaccctggtgatccccttgcccaggttgtctctcggagccctgaaaccacctgggcctcgctggagccatggcgccccctggtggaggcctgatattctgtccgattccaaccaaaattctaatactcgggctggagaacccctggcctgggggacgccccttccgtgaccctcaaagctggatcaggctcaaggccccaattacagcacaccagggagcagcccttttaggtagggagtggaggtttgtccaaaagcaccagctctggggttgccacaagccgcctgttataaaaatgctcccacccccagcacagtggaattttggggctggaaatagactttaaagtatgtttataactttgtgtccaaaggctttggctgttaaggaggcaaggattctctgactggctccgtgctgcctactctgcagttcttgagttgtgatgagtgagtccattgaaaggaataacactatcaacctaagagccaagccaggtttccaggtcacatcctggctgatgctcagccagagctccctgactgtgacatgagatggtagagcagcgcaggcccccaaagagcatgacagagtcagtacttgtttgtttttcttttgagttggagtctcgctctgttgcccaggctggagtgcagtggcgttatctcggctcactgcaagctccacctcctgggttcacgccattctcctgcctcagcctcccgagtaactgggactacaggcactcgccaccatgcctggctaattttttgtatttttagtagagatggggtttcactgtgttagccaggatggtctcgatctcctgaccttgtgatgggcccgccttggcctcccaaagtgctgggattacaggcttgagccaccggacagagtcaatacttgtaatgatgcagatcatattcctcaagtctcagacaccacccgagagaaaggcatgctgttatgtattatgggaaagaaaaaaatatcacacatcctaaggcttctctcagcacctgagttgttaaaatgtgaaagagacctcagaaatatgggggtgcttgttaaactagaaaatatgcactgaattctctgggcagggacaagtccatgttcaagtgctgaaagtgccagagggtttcaccaacatcacacgcctgtggggagggtgctgggaccttcctcagtgaccctctgtccccgagcccccagcaaacaccgtgtggcacagacgaggtggaggcagggctttttaaaatctcagatgctgctttatttaccaaaggtgctggcttggggctggttctgctggccaagccagcggatggctgtgggggtcccagctcagtcttccaagggcgagactgtacagccttgctgtggggggttgggggcagggttccctcccggggccctgttggggttcccgcccagcggcagccagggtgggcagtgggtaccagcactgccatctcaggaaggcactttcagcttcggggtccccaggaagaactgcaggacgcggtcggccaggagcgccaggcagaagtccaggagcaggacctgggcaatgaccagcttgaactgtcggggcagggagggatggtgagctggagacctgcagcccagctcagggtcactgccataggagggacccatcaagctgagccccagggtcacctccacagggccactgacctccacagggatgtccacgaggccaaactggctgttgaagtcgggcgaggagccgaggagcaggccaatgatggccaggagtgaaactgccagactccacaccaggggcttgttctcgggcaggctctccatgaagggcgggccctgtggggatgagggacagatggcttcatggggtggggctgggtgggcagacagtgaatgtttgggcagggcccaggccttactttgtaattgatggcgaaggtggccatctgcatggccatggccatgatgtagacggtgctgttgaccaggcttggctcaaactccttgtacaagtccacgaactgctcctgcctgcaaggacacatgggagtcagggccccctctcctgctccggctcacacacactgtgtggcttcctgctgccctggcacagagctagggctctgcctggcctagtgcccctccctggacaccctggacaacccccagcctctcctgctgaagtctgtggagtcatcctcctgctattctcagctgcagggacatcacctcctccaaggcagcacttacttctcggggctccgggcctgggcctcacggtacaggtagacaaggctcaggaagtgcacaaagaactggagcatgacggtgaggatggtgtacaggttgaagatgttgggcaggggccgttctcgggagagggtcttgaggggctgcagcagcaaggcgggtgggggagtcaggatctggctcacttggggccaccctgcccacacagcaggcagtaacatcccctgcctcccgggagaccttgtgtacagccaccaccaaatcctgggggattccatgggtcagcaccagtccctggatccctgcctgcctctcacccctgagcccagggctgcctccctggccccggctccgccatccaggctccccatggcagccacaggggcctgagaatcatgaagcagatcctgccctccctggagcccacgggacaggcacagtcccgcccagccaatctcccaccccctccagccaccggggactccctgcgtcagcccatgcctgtttggggcctttgtgtccagttcctggccgctggcccccctggttctttacgccttggcctgagtgtcggtgtcgcacaggcctccccagctgtccaccagcctgtcctgtgtagcctatgacccacttagttgtttttttaccctcttgatgattgttccttgcttgtggggctctgtggggcccacccctgggacccctacctgtggacaggtgtggacgccaagctgtaccacctggaggggtctgggagcctcagtccacacctgccctgccagcatttcctgagccatcccagctacagcccccatctctggggccctgggtcctgtaacttggggatgacaattcccgtgcctatatcagcctggccctggcaggcccatgcatccctggccttccagcacctctggggcccaccttggaacgggagatgaagaggaagcagccggccagcagcagcccctgtagggtggcctggaagtcactgaacttgactccctccaggtagaggacgctctggctgtaggccaggatgagggcattgagcgccaggatcttgaacatctgtagcgtggtcaccagcgtgcagcggccctgcttgatcacgtggcagactgcagggtggtggggaggcaggtgtgggtgtgggtaggggtgccaaggggggaatgaagggagggggagcgggggcaggcaactcactgcactggatggatgagagcttggaggtgaagggtgctgcgatgctggcatcccccagtttcacaatgggcgtactctcgtcctcgaggtctcgcagcacctggctcaggcggtcctgcagggtagacagcaggctgtcagccctggccaggatggggtgcagcacctcccctcttgggactcaccctctgggaggttggctgctcctcggagggagggagccccgaccgctgcttggctgtcctggaggtggctctgatgccactgttgctcagggttgggctgtcccggggccgccgtcgccgctcgacaacccgctcaggggcattggccaagagcgccacacctggggggcaggagggtgtcagacccggaggagcaggctccacggaggggaagattgctggcttcagagccactggtcctgaagtcccccagctggctcccgtgaggacagttcccagacttccccatttcacctgacaccctaaggagacctcagagagtgcccgtgttgctttctacaaactactttaagaaaacaaaccaccaacaataaacccccacaacaaatgcaatgaaaaaacacacaacacgagataggtcaaaactaaactgattttggccgagcgcagtggctcacacctgttatctcagcactttggaaggctgaggtgggcggatcacctgaggtcaggagtttgagaccagcctggctgatacggcgaaaccccgtctctactaaaaatacaaaaattagccaggggtggtggcatgtgcctgtaattccagctactcgggaggctgaggcaggagaatcgcttgaacccgggaggcggaggttgcagtgagatgagatcacaccaccgcactccagcctgggcgacagagcgagacagtctcaaaataaaacaaaacaaaacaacctaaactgatttcaaaagaaatagccaaggagcatgattctaggaggcaaacaacactcaataaatgctttagtagataaaagcagataaatattggaaaagcaaaaaaaccaacgtaagattgatctttaaaattcaatttaacacctgagttcttgcaaaaaaaaaaaaagaaaaaagaaaaaaaggccaggtgaggtggctcacacctgtaatcccagcactttgggaggccaacacaggcgcatcatctgaagtcaggagttggagaccagcctggccaacatggtgaaaccccatctctactaaaaatacaaaaattagatgggcatggtggctggcgcctgtaatcctagctacttgggaggctgaagaaggagaattgcttgaacccgggaagtagaggttgcagtgagctgagaccgtgctattgcactccagcctgggcaacaagagagaaactgtctcaaaaaaaaaaaaaaaaaaaaaaggcagggttcggtgggatgcagtggttcacacctgtaatcctagcactttgggaggccaaggcgggtggatcacttgaggtcaggaattggagaccatcctggccaacatggtgaaaccccatctctactaaaaatacaaaaattagccaggcatggtggcacgtgcctgtaatcccagctatttgggaggctgaggcaggagaatcgcttgaacccgggagatggaggttgcagtgagcccagatcgtgccattgtactccagcctgggtgacagagcaaggctccgtcaaaaaaaaaaaagacagggtcttgcactgtcacttaggttagagtggatcacaccactgccttgaactcccagactcaagtgatcctcccgcctcagcctcccaaagcactgggattccaggcaggagccacagtgctcagccatctgtgtgcttttgacagagatctggggctatgaaccatcttcatggcttcagctctgggttttctgagtcactctcccaacttgttgcctctctcctggcctctggcctccgccctgctctgttcctgggatattcgcatcccttcctgccctcaaagcccctgaccttgccaccccctcccatcctcacaggaattagtgcccccgtggctgtcaccaagggccaggtctgtctttctagctcagtgacatgtcctcaacacctcgtccacaaacgaaataccctagcccacagcactcacccacgtcagcatgcttcagggcgcccacgtcgttggtgccatccccacacatgagggtcacgtagcccagctccttcaggctggtgatgacaaactcctgtatgggcggagacaggctgagcaggggctgcgtgcctaccgctgtgcccctgacccctagggctgtgcacataccttctgcttgggagccacacgggcgaacacctgcacatgggggatgaggcggagcagctgctgggggtcggtggcctgcaggtgggccaagccgtcgcctgtgaggcacagtgcgtactccagggccagtgcctttggggagccccgggccaggggcagcacgatgctgccgtcaatggagcgccactcgcactgccggcctgcgggcagcacctagggttagggctgggggcttggctgaccgggctcagaagcaccctccctccactcggaccccagcaccagccagtctctcctctctggagcccgcacctccctacccacccaggtgacccccagcccttctctggggactccacaaagaatgtccctcaggtgcacagggtggaaccaagagcctggggcctgagctacttgcctgagagcccgggacacagccagattagaacctgggcagtctgaccccagctaagccatgcccccacctcatgcaaggccccctaacctgaaacacacagaagggggctattgcgctctccttgggaaaccccacaccaggccctcacctcatttatccctgcgcccgtggcctctctgaaatcctgttttctcggggctgggccccctcccaactctgacagggcccctgagttctcaacatcttcttgctccacttcccctttcttgctggctggccctggcttggatgctgggcgctgaggatggccaagggcggcccgccagccctcctggcactgcctgctcaccctggaccatctcaagctgaagggcagcacacttccacctggcttgtgctgcagctgttgctagaccagcttcgcttgtcaatcaacagttctgctcatccgctccatgccacctgcccacaatccccaggccctggaagaccccggtagctggggctgggacagggggaggcctgcgaccaatagaacagagggagggcagggaccgagtcctctgagaggtggcctggaggttccggaagctgctctggcccagacctgtgaatgtttgctgccagcagccctgtggcaacactgctccatgtggttcttcttagggccctgtcaacactcatgcaggtcctgaactgcgtgcgcccacaggggcttcacctctagctctggggcaggtatctggtaagccccacacctctagctgggaggggctgggtctctatgtctgcctcttcatcaatctgaatccagggcattgctcaaagaggtcactggggagaggttggagccttgagctctggaatcaggctgtctggattccaatccttagccatggattggaagtgacctgggcaagtgggttcacttctgagcctctgtcccttctctacaaagcagggccccgagagctgacccagccagcttcctcctctgtggtgtggggaaggcaagccaccccgtgtggtgcaggatggggtggagggaccaacgcagtaacacgcacggagcgctccgcctggggtctggtcaggctgagcactgggcaaactgccatcaactgtggctgaggatgccagcagtccctgtgctcgggaagggagcactcggtacatgggcagcttgccgggccaaagagggtgtgaaatgaggatgacactgaggatggggagtaagcgtggtaggagcagtatctgcccatgagtgcacaggaaacccgagctggcagtcagactatcgcctcattatggtaaataaacacctacatgccgcacatcctgggacctgcgacccagtgaacgctcacatgctgtccgaggtgcccagtgggccagggctgtgattagtggtgccaggcatttgaagacactgtgctgctgaggcctggtacacaggtgggctgttgcgatgggagctgttcttggactcagggtcccccttccccactgtgggccaggctagggcctcacctttctcggagggaggctgcaggatcagcgtgtgggccttttcaatgaagtgcagctcctgggccacgtggcatgcagtgagcgggttgtctcccgtgatcatgaccaccttgggtaaagaggggcagaggctcagcatggcaccctggggccaagctctaggccagagacaaggctgccaagtctccttctaaggtaggccacagtgggagatcctgggcctctaaccgagatgctgaatgggcttccaagggccacaacccacccccacccaggtcattttacacaaatgacacgtgtatgtgcgtccttctgaagacacccttagcttggatttgcaatacaaatgaacaacctgcccctgaggtggacccttttggcttggtagctgcccatgggggtaatatttcagcaaagaggaggatgggaccatgacctctgggcttggtggggactaatcacatcacccatgtgacccagagccatcatcctctgagacggctcactcaccccttacaccctaaaagacaccctaagtcccaaaatagaaaacacaagccaccagaagccaccaggacaggcagacagtgccccccacccaactccccagcctcagcttccttctctccaggacggcggtggaacggggaagtggagagaagtgcccccatcttcccatgatgcggggagtgaagggagtggtctgtggaggagagaggagccagcacaggcgggtcccagagtgtccttgggccagtggcaatgttagcacctgagctatgatcttgctcagctaaaacatgcagcctgtgagacttgggtgcccacccctaccacgaagctgtaattgtcatctcctcgcctctatttcccatgcagagggtggagccgagcaccgtcccatacccggtgggacgcattctggatctcccggatcacggccttggagtcagccttgagcgggcaggagaccacaatgaagccgacgaacttgaggctgcactccagggcctcccgcttgacctcccgggcctgcggacagacaggggcaccctcaccatctgtccctccctctgcccacactctgcatttcctgagctctgaccatgcgctgggagccaaggggacaatggaaggccctgttcccgtagtgggcacatgcgagggttgggaggggagaaatgccaggagggtaccaggcacgcttgaggggtgggatctggcagtgactggggggtctgggtcccccgaatgtggctctatgtcctgcttgcggacatgggcacatcacagagtcccttgtggctcagcttccaagtcaatgaagtagggactctcccaataatgttggagtttagccaggaactcttactcactggggctccaccacataccacagactgggcacagacccctggccttagggagctcacactgcaccaggggagacgcatgatcaagaaagtcacagaaatcggagtgctgagtgccatgagagaggaggtgagaatggaatccagagagggtggaaaggcctcagaagtggccactatgaaggcgatgaggacctgtgtcactgggaagggggctccaggtgcaggaacggggcagagcatgcaggctgtgagctgtggcctgggctctgcacacagtactgcaacctgaggctaaattctggaaggatccgcagctgtagggtgcaagcagaaagaacgagagcccaggaagaagccaagcggcagatgtgccggtggtggaggcggagggtgggctttgtggaggatggatgggtgagagggctgaggatgccacctagccctgcccaagaccagggcaaaagagtagagctagggacacaccaggactggggcaggtaagccctgcgtgtgctctgcgtgagccaggactgggtgggtccccacagcagtggacagactgagtgccatttggagtctccaaaggtagaagctggaggcggggcaaggaggacaaaatcacaaccattcaacctggcactgtgggacacaggaggtgactcagggaggagctgacgggccaggcacatggtgaaggcagggggagcctgggcccgtacctgctggtgagtgaggtgtcccagctccttgtaccccagcgccaggacgcgggctccttcccgggagatctcggtgtggatgtggtggtagtcgggcgggcactgggagaactgcagggaatgcagggggatgtcacgggctgccccgcgcccccaccccttgccccaggctggggccagctcaccatggagtgcagagtttcgggggcccccttcacggccgcgatgtagcagaggtcggtggagcccagcttctcatacgaggcaagcacggacattcgcttcagggcactggcaaaatgaaagcgctggtgaattttcagcccctgagttttaatacttcgggggaatactttctcatctggaaacaaataagtacgagtcctgaggggctttgctccaaagaggcagccaagcccctacctctcaccccggcctcccccacctccctcctgcctcccccagggcctgatcggggctctgggctagagcaggtgttggtccagagctggaagacctgggcttggaggaccctggcactgtggcttcggccagggcagggcagattccaacccagagggacacccaaggacgtggcctatcctgggtctaaagtgagcctctggccacccacctcggggagcatcagagctgtaggcctgcctgtccccaagatgctctgaggggtgcagcccacctgcctagggctgtgagagccagtggctcccccttgctgggcctgaggccccagcccctcacctttggtcagcgtccagtccacggccgtcagcatggccttctctagagggtcacccacgagggtgccgtcgtccagctgcatgagcgagtggcacgaggccagggcccggtgtgtttctacagggatgctggacactggggtcacctccttcccgtctctgcaaggtcggggaacagctggttacagagtgcaggcgggtagggcgaagctgcatccccaccagcagaaggacccccaaggccattcattccgtgcttgtcactggggtggcttgggcgccaactgggtctttatgagacctgcacctgcttcacagatgcccccagaagccaggcattgtgcctgggggtcatgtggtgcatggctggtgtgggatgttccaggcctgagctgagcccccgtgccgctaccatggctgacacccaggactttgtggggagcccctggaaatgaacccgaggcagggcctctgacgggccctcactgcaagggcttggggtggatgggccacctgtctctcgacttcccagaaaccccatctgggtgacctttgctgcagggcccctgatgcttacctcagcccggccacaccgcgcaccaccaggctgtcactggtcaacgtccccgtcttgtcaaagcagcacacctcgaccttgccagcaaaggggatccggaagggctctgtgcagtacatgtctaggggcgggagtgaggtcaggggtcctgcttggccccagcccactcggcaccccatcccatttgacacactcacagagcttggccagggcgatgagggaggtgttgacggccagggacagctcgatgggcagctcaggaggcacgaccgaggtgaggatcagggtgcactccagaaacagcttgtagcggttccggctggggtccttggtacctgtggagacagggcctgccaacctggagcctcggagggtgggcgcaggggaccacagaggccgtggcgcttaccttcaatccatacataggcagctgcagcgatggcaaacaccaggaggaagaggatgaagatgaaggtctccaggttgttcgcagtcaccctcttgaccccgaagaggatggtgcgcagcagcttgccctggaggaatggaggaacagcctttctgctgtctggactccctccagcagctcaggcctggaagcgtgggcctggtcttggggtggcctctgcaccctggcccaggtccagggccgtgctgccagagtcagcccgtggggcagatgttctggggtcggaaagggctgataccttggctgtccaactgccctggggcccgccctccccagacctggccccgcacctgggatgtgttgaatccggtccgcaggacgtaggccacgcacccgctgtcaaccgctggggagagaagcagagtcaccgtcatgcctgtctcctcgtcctgactccctcatgatcaagcagacgggcaaagggggtggaagcccagatacccccagacgcccatgaggcacctacgcttcaggcccgtggtggctttctgtggggggatgtgctgcaccaccttggtgcccccgaagatgacgtgcagccgggaatcagcctggaggtccagcacccggtctgggctgaggtcttcgatgggctcctggggaggaagatcgtgaatctggatggccaggcctaccttgcttccttctccatctgagttcctggacagctggaccttgaggctggaatgagccagggggatccccacccgaccaatacatcccacccagctcccagatcctcaccctcaccccgtcctgtcttctccccattgcactcacagtgcctgctctctggggcctgcacttggcctcgtctgggactcacccctctggactgctcccagcccaccttggtctgacatcccagggcaccaatgtaccctggatgcccttggctctctcacctccttcctcgcccccaccacccggctccccagtccacagagctcatctgtgcccacactgcctcctccgcctgtgcctgagggggatccccgccaccccctgggcctccacctcctggcctgtttcctcctgaacagcttgaggatccccatcctccaccaagtaccttcatctgtggcacggactcccccgtgagcatggcctcgtctacgatgcagcggcctcgcagcagaagcacgtcacatggcaccaggttctcctgtggggagcggcctgcagggcagaggcaggagggttggccagaggccctgaggctggggctcccactgggactgagcggaacccggcctcaccgatggagacgatgtcccctggtacgatctcatcactggcaatgggcctccacttgcggcttcggtagacctgggcggggcatgggtgtcagcacagaagccgcacctgtgctgcacccccaacctgggtctccctggcagccacacctggatcatgtggggcttgttgcccatcttccggatctccgacatgttccgcatctgctgctgcaccagcgaggcctcgaacgccaccagcatggatagcgtaaagacgctgtagtaccagtactcatccaggcaccagagccccacacagaacacctgtgggataccagcctgtctgtccttgccctacccgccctgttcccatgagccccttccacccaccggatctgatatgtgagggtggggagaggcttccaggtttagaagtggtgggcaggcttgatccggttaggaaagccccaagggaggaaatggggagatgggccagagctgctgctttacctgaaatacaaagaagggggctgtggctctctccttgaaaagctccgagaagtcaggcaccaccatctcggccctgcaagagaccaggccccatcctgttcccagggcaaggcctctggggtatggagtctccaccctgacccctccaacctgagcatggcaggccgctctcaagaaaccaagagccatatgtgggcgtcgggagccctggcgagcttccagataggaggatccatttggcagtggctctccctcatcctggctgagcctggggtagacatgctgcccgcccacagccctcggctctgcataaaacagatgaagctccttaatctgcaatatgctcttcctggcagcctggggctggtgtcagacgagagcccgtcatctggtcgagtgacacagcaagtagagaaggaacctctgattgaaagatggaggccctgaagctacagacagcagaagacactgagacccagccccaccaaagctgagattttctatgattcctgaattaaagccccagaatgggtcgagtagggtggttcacgcctgtaatcccaagcactttgggaggccgaggcaggaggagtgcttgagcccaggagtcagagactagcctgggcaacacagcaagaccttctatttacaaaaaatttaaaaattagctgggggtggtggtgtgtgcctgtggtcccagctatttgggaggctgaggcaggatgaatgcttgagcccaggagttcaaggctacagtgagccatgatcacaccactgcactccagcctgggtaacagagtaagaccctgtctccaaaaaaaaaaaaaaaaaaaaaaaaggctcgagaatgcaaggacttgggcctaagggtgtgttctgcagtactctgtgccatagtccaatctgatcagggcaccagtcatgtcaacgagggtcattctcgctctgccctttaactgcatggacgtcttatgtatgggatgtgagaagaggaaaccaaagagcaaccccactgctatcaaacaataagcccttcccttgtatcttgctgggtacctttgcgttgagtaagaacagcatgaaagggaacgtagttgccacaggccattaatgtgactggccaaccttggggtaggggaagttgctaaatgtttcttataaatccttgtattagattgatagttgtagtcaacatatttgtaatctctgaacagtgattaagtcaggaaagagctccctaggtgttctgtgggtttctgggttgaggaccatcgtaacaaggccatgatggggtttggagcccagttctccggctcccagccacgtgtcagcatttgcagttttggtgaagatgaagggagagggtgtgcaccgcacattggccattgtactcagtacaaaagggcagacatggtcacggtcttccatcaccattctgaagcgctgagatgcgtagactcgaaacagtgaggactgaaatgtttaggttgggtgcagtgactcatgcctgtaatcccagcactttgggatgttgatttaggaggactgcttgaggccaggagtttgagacaagcctgggcaacacggcgagaccccatctctacacaaataaacattttaaaagaatttaaaataaagctgttgctgaggaggggccacaggctagactcctgtgaagaaccttacactcaaggtctcacaccccagggcacgggcttccagctgcagaccctctggggttcctgccagcaggcaagttcaggggagactggacttagagcatgttgctcaagcggcatcacagtcacctgggacatttggctaaaagggcagatttggccgggtgcagtggctcacgcctgtaatcccagcactttgggaggccaacatgggaggatcacctgaggtcaggagttcaagaccagcctggccaacatggtgaaacccccatctctactaaaaatacaaaaattagccaggcgtggtggggggagcctgtattcccagctgcttggcaggttgaggcaggagaatcacttgaaccggggaggcggaggttggggtgagctgagatcgcgtcactgcactccagcctgggtgacagagcgagactcagtctcaaaaataaaaaataaaataaaaataaaataatagtaaataaataaataaaagggcagatgcctctgtcccgcttcctaggcaccctgaatcaggaggggagcaggacagaaaggcaaaggtgctacaggcaaatcaaggactcacttgttgctcccaaatttcttctcagctgctcggatctctgagtcttcctggaagcctctgttgctctgatagtatgagaaggcgtttcccacaggaaaggccacggggagaaactgcttcttctccagggcatcgtaggaatacttgatcttctggaattcgaaggacagcacctcaagcccgtcttcgccctgcggtagaaggtgtgtttgccacagaggcccctgaccttggggtgtcagcgcctgggaatcctactcaagcccctcctccaggagcccagcaggcagtccctacctcattgcggtgcagggccacgagctccgtggagccattgttgggggttggcaccaccttcacaaaggtcgctttgctggggtcgtactcctgacagagacaaagaaagcattgtggcttagctcttctcaacctacagttccaagacccccccgggaggttttgggtgcagcagctctatgggtatattctgaaatgccactgggctctggtgctgcctctgtcactccctcgtctgtcatcaggacaaacgagaccatcttgctgtgcctctggtgccacacttaaagctgggagcacaaggctgggcacggtgactcacacccataatcccagcactttgggaggccaaggtgggcggatcacttgagatcaggagtttgagatcagcctcgccaatgtggcgaaaccctgtctcaactaaaaatacacaaatgagccggacacggtggtgcacacctgtaataccagctacttaggaggctgaggcaggagaatcccttgaactgggaggcggaggttgcagtgaactgagattgcaacactgcactccagcctgggtggcagagtgagatcctatctcaattaaaaaaaaaaaaacaaaaaaccagccaggcacagtggctcgcacctgtaatcccagcactttgggaggccgaggtgggcagatcacgacgtcaggagattgagaccatcctggctaacacggtgaaaccccatctctactaaaaacacaaaaaattagctgggcgtggtggcaggcatctgtagtcccagctacttgggaggctgaggcaggagaatggcgtgcacccaggaggcagagcttgcagtgagccgagattgcaccactgcactccagcctgggcgacagagcaggactctgtctcaaaataaaaaggctgggtgcagtggctcacacctgtaatcccagcactttgggaggctgaggcaggggggatcacgaggtcaggagtttgagaccagcctggccaatatggtgaaaccccgtctctactaaaaatataaaaattagctgggcatagtggcaggcacctgtagtctcagctactcgggaggctgaggcagaacaatcacttgaacctgggaggcggaggttgcagtgagccgagattgtgccactgcactccagcctgggcaacagagccagactccatctcaaaaacaaacaaacaaacaaacaaaaaaaccccaaaaaacaaaacaaaaacaaaaacaacaacaaaaaaagctgggaagctgggtgcacagacagcacctaatgcccagggctctgctctgctgaaggtgacatgaactcaaataggaagaacgctgccaggcacccacccagtacgtcctcaattcacgtgagccaagcccccgccccatcacaggcccccggcctcctgctcagctctgcctcttccaccaaccctgctcactacactccacagctccacacgcacatggggctcgatcgtgcctcagcaaagggccttggcatgtgctgttttctctgcccggaatacacagtcacacagctcccttgctgcctcaggcttttgctgaaacatcaccttctcaggagcccctccctggctgccccatctaaagttcccggcaatgtcccatcctgtcctgatgttagatgtcatctctgtttggcatcaactgctgactatgagttctccctcccagtaacaccacaaaggcagggggatttgcctgttttgttcactgctgtttccccagcacctaagacacagaaatgttgaatggaactcgttcagtgctccctggaccccgtgaaccgccatccattcctctgctgctctgctagaccgagctgcatggagacgagctgcatggagatggggggagcacaatgatgacccgcagaaacaaagcgccaccgcacgggtggttcatgggcctccaaagcaggcagcaaataacaacaatcacataactacaaacgtgacgtcacggaagaaaggtacaagaggctatacgctgtgatggccccagggcgggcactctgcagatatcatctccgcttctcaagatggcacccagtagttgttagttacggttctcagtttacagaagggggaaactgaaactcagagagcagaagcggccctttctgagatctgaatcaaacccagatccacctctcctggctgatggctgttcagctcctcccacttctccatccctggagaggaagttaagagctaagctgcttagctgcaggtcaaaaggcagctgaagtttgagcggtgccacagtccccttaacccctcctttattttgtccctcattggtgtctttcattgtactacctcaaagctaccacgttgagctcctcccctgggatagataagtctttttgaaggacagaacaggttgtctctcaggagaggagaatgaggattctacccacattcagagccagccagggtggggggcttctgtctttctgtagcccttgatgctgttcccttttcctcttcttgaggcaaacacactcctggaatcagaggggaagcttcctgatatacctcagtgtccatggctccaaacctgctggtgtcacctgaggcaggcccagagagagacgacacagtcactgcttcaggcccagggaagctcacagtcaccaactcctccgacgacacttggtcactcagaactctaaactgtgggtcaggagcgcgaccttgcttgctgttgtatccccgacagaactcagtatcaccaccctcattttgcggaaagacatcatgtaaatgactcgctcataaacacctctgcctctcttcaacactgtaattaactgcatttcatgctcctttccatcacagtatggaagaccactaagcactggacagcaagacttggttcagtctaagaaccaactaagcttcatagatgggggaaacctatcccagtgatctcgccttacactttgaaaaccaaggtaggagacagatgagatggaaggtagggccgtttccagaacaagagtagtcgctaatatgggaactagtataaacaactcctacctgacctgggcgacgtatgctgggccctgcgctaagccttttacaagtattacatcactgaatctaaatgaccataacagggaggacttcagaaaaaggaaataacccgcaccaggcatgcacagcaagtcagcagtggggtcatgattaagcctgcgccaaagtgtagagggtgcccctgggaatccaggccaggcagatgagtggcccaggtcgcgatggtgaccgacaggaaggccgcagctgggacccacggcgaggctcgaccgtgctgggggtcgggctcgcgtgtacacacttaccggggtgcaggtgagcgcgcaatgcgcgtgcacagaccaatgccccgagaggacagtgagcgcgtgcgcgaggcagatggtggcaagcacgagcagcgcagcttcggggatctgcacccaactgctgccccagccccagcagccagcggctgcggcacccaaccaggccgggtaaagcagcccggcgaatggcagcaccgtgaggcgccgcaacagcgccaaccgccggtacggccacacggcagccaccagctcgtcaccgttcgctatgagcgccggcccggcggcaaggagcgcgcgcggctgcggcccgggcttgggctgcccgtcaggccggaccccgcaaggccgggccccgcagggcaccgcgttgcccaccgccgccgctgccgccatctttcctagcgccgcgctcacttccgggcagaggaacgcctcacttccgaagttttacttccggtaagccctgagcgccgccatggcagcctggactaggaagagccagggcaacagaacaggctggccccggcagggactacttcgggtgccgccatgacaggctgtggccggaagaagaggctgggcgtcgccatgacagagagggactggaagacctaacggtgcctgcctccgctgccacgccggactgagaccggaaaagacaaggccggcaaggcgggcttgggcgccaccatgacaacctgaaccaaaaaaagcgagccctcctccttgactacaccagcaccacctgtcaccaggggcgaagcctggaccctgcggaggcggggtcgggagcttcggagttcaggaggcggggcccggtgcggggggcggggcttgtgaggggcggggtcggggaccgccccggaacacaaccacaccggacaagagccttaatgtgatagataagaattacaaatactagccgggcgcggtggctcacgcctgtaatcccaacactttgggaggcgaggcgggtggatcacctgagatcaggagttcaagacccaacatggtgaaaccacgtctctactaaaaatacaaaaattagccgggcgtggtggcacatgcctgtaatcccagctactcgggaggatgaggcaggagaattgcttgagcccgggagacggaggttgcagtgagccaagattgctccactgcacttcagcctggccaacagagcaagactgtctcaaaaaaaaaaaaaagaaaaatgaattacaaaaaccactttaggccgggcgcggtggctcacgcctgtaatcccagcactttgggaggccgaggtcaggagatcgagaccatcctggctaacgcggtgaaaccccgtctccactaaaaatacaaaaaaaaaaaaaaaattctccgggcgtggtggcgggcgcctgtagtcccagctactccggagcctgaggcagaatggcgcgaactggagaggcagagcttgcagtgagcggagattgtgccactgccctccagcctgggcgacagagcgagactctgtctccaaaaaaaaaaaaaaaaaaaaaaagaaattaccactttaacataaaaaatgaaaaactggtgtttacttgaaattatatacttctaggccgggcgcggtggctcacccctgtaattccagcactttgggaggccgaggcgggcggatcacgagttcaggagatcgagaccgtcctggctaacacagtgaaaccccgtctctactaaaaatacaaaaaattagccgggcgtggttgcaggcgcctgtagtcccagctactcgggaggctgaggcaggagaatggcctgaacctgggaggcggagcttgcagtgagccgagatcgcgccactgcactccagcctgggcgacagagcgagactctgtctgaaaaaaaaaaaaaaaagaaattatatagttctatattattaactgtactgttgcataaatgctatttgaacaaaaccacaataggactacttaacagtaccaattagtaggattaaacagtatgtgtgacaaacagtaactattttatgtttctttttgtcctctgatacagcaaatttatttaaacttaaaatttattggatatttaaattttgtagcttatattgttgcatattctttttttaatttttcgagatgaagtctcactctgtcgcccaggctggagtgcagtggcgcgatgtccgctcactgcaaactccactttccgagttcaatcgattctcccatttcagcctcccaagtaactgggattacaggcgcatgccaccgctccggctaatttttgtacttttttttttagacggagtctcactctgttgcccaggctggagtgcggtggtgcgatctcagctcactgcaacctacgcctcctgggttccagcggttctcctgcctcagcctcccgggtagctgggactacaggcgcgtgccaccatgcctggctaattttttgtattttcagtagagatggggtttcactatgttggccaggttggtctcgaactcctgaccttgtgatccgcccactttggtctcccaaagtgctaggattacaggtgtgagccagcgctcccagtctaatgttttgtgtttttagtagagacgggtttcgccatgttggccagtctggtctcaaactcatggcctctaatgatctggccgcctcagtctcccaaagtgctaggattacaggtgtgagccacggtgcccagtcctagtcttgttttgttttcttgggacggagtctcactcttgcccaagctggagtgcagtgttgcaatctaggctcactgcaacctctgcctcttgggttcaaatgattctcctgcctcagcctccttagtagctggaattacaggcatgaaccaccatgcctgctaatttttgtatttttaggagagacagggtttcaccatgttggccaggctggtctggaactcctgtcctggcctcaagagatctgcctgcctcgacttcccaaagtgctacaggtgtgacccgctgcggccacccactgcatattctggtttttttttttttttttttttttgagacggagtctcactctgttgtcaggctggaggctggagtgcagtggcgtgatctcagctcactgcaacctctgccctcggagttcaagcgattctcctgcctcagcctcccgagtagctgggattacaggcgcctgccactgcacccagctaattttttgtatttttagtagagacggggtttcaccttcttggccaggctgagtcttgaactcctgacctcgtaatccacccgcctcggactcccaaagtgctgggattacaggcgtgagccaccgggcccggctctggtttttttttttttttttttttttttttttttttttttttttttgagatggagtcatgctctgtcgcccaggcgcaatgctgtgatctcggctcactgcaacctcctcctcctgggttcaagcagttctcctgcctcagccttcttagtagctaggattacaggcatgcgccaccacacctggctaatttttgtaattttagtagagacggtgtttcaccatgttgggcaggctggtctcctactcctgacctcatgatccgcctgcctgggcctcccagagtgctgggattacaggctgagccaccgtgcccggctgcatattattaagatacatgacttcgtaaaaggagaaaggaaatgtaataggacttaataatcacatagtatcaaataagataatcttcagtaaaaataggaatgacatgtttctgtcccatgatacagttcgatatacttactttttcagttttttctccaatattaattctttcccatacaaggtccaagcttctgctcttggagtctgggactggacccctttctggtagcaatacctttatagaatgtttactccaggccgggcacggtggctcatgcctgtaatcccagcactttgggaggccaaggcgggcagatcacgagttcaggagatcgagaccatcctggctaacacggtgaaaccccgtctctactaaaaatacaaaaaaaaaaaaaaaaaaaaaaaattggccgggcatggtggcacatgcctgtagttccagctactcggactcgggaggctgaggcaagagaatctcttgaacctgggaggcagaggttgcaatgagctgagatcgtgccactgcactccagcctgggcgacagagccagactccgtctcaaaaaaaaagaaaaaaaaagtggtttactccagtttttccctgcatttaataattttgttccctttaaggcatgtttttattttcttggctgaaaaggagtagcctgagaagaagtaacgtgtaggaagccttggccatgggaccaatagcctcataaattcctgatctctggaggacatcagggcctcctacctgttccattgtgacctgggagtctctccagctccaaggtggagggatggcttcactgaacacggagtctggaattccgtgcacactcatgtgaccggtgttccggaaaaagaagcaggaggcggctgggcgcggtggctcacgcctgtaatcccagcactttgagaggccgaggccggcggatcacgagatcaggagttcgagaccagcctggccaacatggtgaaaccccatttctactaaaaatacaaaaattagccgggagtggtggtgggcgcctgtaatcgcagctacccgggaggctgaggcaggagaatcgcttgaaaccggaaagcggaggttgcagttagctgagatcgtgccattgcattccagcctgggcaacaagagcgaaactccgtctcaaaaaaaaaaaaaaaaagcagcaggaaggacccactgagtacaggaagccgacagggcctgctccggaaaaccaggagctgtaaggtcagccgaaaggacgaagagacctgaagtcagtcaagtaagttttattaacctgctgggctgctcccccacagttagaggaggcagccccgcttacagactacagcagggctttatagggcgaggaactgggctggggtgtgagaactgagtcgggggtgcaggtgtcctgaccgcatcctggagatgtttttgccagctttgttatgcaaggtgggcaggtgttgtgaccgcatcctggaactgtctgccggttcagctgaagtcttttgaacaaacagttactggaagggtcagtggggaggaggtctacttctagcccggggggagttgtgtggcggtcacaaaggactgtattgtaagactgatgggggaaggaggggaacagtctggttgggttgaccctaacgggagcaagttctgcttccatgcaagtccaggtccaaggtcccagcgaggggctgtgggtagcacctgtcagtcacaccccacacagcgagcggattatttgaggattccgatcacctctcctgtcgctcaagccccaggggcgggacctggggcaccagccagtcagaggcgctgtgcggcaaactgtccaatcaggtgcgccgggaggaggggcaacttccaaagcccgaagcggtctcatttcccgccggccccccattcgggtccgggttttagttcctcggggagcccctggtgccccggatacggctgattttgtcgtgtgggacctgttctggctgctccagccccaggaaggacccaggacacccggaagccggaaatggtgagcgtgcggagccgggcgtccggagacctgaggaggagctggtcggaaccggcagtggctggacctgggcctccccgcggcgactgtgggggtctgggacccgagtcccccaggcgcagctcgacccttggtcccctcggtcgccgggtggagctggaccagccgccgggaccccgggtgtcctgtcccggccccggagccctctcagggcagctccgcgcccgcagccccgcgtctccccagatcgtgcgggggcctcaggagggtcttagggggaatcccgcctcgggtgtggggttcgtgcgggaggagccgtggcctgtggggtccccagttcctcctcccttaggcggtccccgtttccttcggagtcttccaaaggtgtgggaagctgggtttcaaacccacgaccccgtcccccagcttcgctcctcccagggctgcagtaaatccctaaatttccccgcattccccaaccctaagttctccctccagtacatccacttcacattattattattatcattatttctattatttttgagacggagtctcactctgtcgcccaggctggagtgcagtggcactgtctgggctcactgcagcctccgtcttccgggttcaagtgattctcctgcctcagcctcctgagtagctggaattacaggtgcccgccaccacgtccggctaacttgtattttcagtagagacaggttcaccatgttggccgtgctgaagtcctgatctcaggtatctgcctgcctcggtctcccaaagtgctgggattacaggcttgagccactgcgcctggcaagacccagtgttttaactgtcatcttttccaaggagccctagatggcacttcttaaaaagttcattttccgtttgtgaacatttcacatgcgagcaaagcagaaaataaccccctgacactccgatgttaaaaaaaaaaaatcactgtgcctgccctctttttaccttccctaggcgcggccaccttatcagacagtctttgggtggaggcttctcttgggaacttcacagggtattgggtcctcagcccaccctcctatctttctggtcctgggtttcaggaccgtccagggacttcttccagctgccctcggaagaacgggtgaaaagtctgtcctggcgtggttaatctttcctggttgtttgatgagcctcctagggaggagttcttgtcttttgaaaagaagtttccttaggaaattccagagggattccctgctggcccttgggggtggggtggggccagaaacagtagaaagaaacttctcccttctgaggcagctcagggtggcatgcagtggcacagtcatggcttactacggcctcaacctctggggcccaagcaatcctcctgcctcagtcttccaagaagctgggaccacaggcatgcgccacgcccggctagtttttattttttgtagagacaaggtctcactatgttgcccagtctgctctggaagtcaaaagcgattctcctgcccaggtggctcacgcctgtaattccagcactttgggaggctggggcgggaagatctcttgagcccagaagtttgagaccatcctgggcaaagtggcgagaccccatttctacaacaaatacaaaaattagccgggtatggtggcgcatgcctgtagtctcagctactcaggagactgaggtgggagagccacctgaacccggggaggttgagactgccgttagctgtgattgcgccactgcactgaacgacagagtgagaccctgtctttaaaaaaaaaaaaggaaatcttccattatggctgcagaatatgaatacattcccacaaaaaaaaggcatggtaggtcgggcgcgatggctcacgcctgtaatcccaacactttgggaggcagaggcaggcagatcacgaggtcaggagatcgagaccatcctggctaacacggggaaaccccgtctctactaaaaatacaaaaaaattagccaggcgtggtggcgagcgcctgtagtcccagatattctggaggctgaggcaggagaatggcgtgaatccgggaggcggagcttgcagtgagctggagatcgcgccactgcactccagcctgcgcgacagagcgagactccatctcaaaaaatacataataaaaaaaggcatggtagataagcagaaattagtgatttacaaagattcaccagcacatcagctcctctcctttgcaggttggggaatttgtgatggtggataactctgttctgttttgtgttatctggatttgacagattaacgctgaatcctttgggataagtttggcaacatctagaagtagtcagatatgatcttttgtttactgaatagtttattatggaaaaaatactgaatgacatctgaaagtgatagatactcatctcttttcctaaggatactaatctgtactcctaggtctctctcatgatctcatgtaatcccagttatttcccagagttgctgcccgtaatattaataccatcaccttaggtgttaggattttttttttttttttgagacagagtcttgctctgtcgcccaggctggagtgcagtggcgcgatctcggctcactgcaagctccgcctcccgggttcacgccattctcctgcctctgcctcccgagtagctgggactacaggtgcccgccattacgcccggctaattttttgtatttttagtagagacggggtttcaccgtgttagccaggatggtctcgatctcctgacctcgtgatccgcccgcctcggcctcccaaagtgctgggattacaggcgtgagcccccgtgcccggcagatatttttcaacgtatgctttttacatcataatcattttattcacgagacattttcagacttcaagaaaaatttcagtaggctttgttcttttctaaaaattgacttcaacggcttgtaacagcaattcaagatgaactgagggcaggaacactggcaaacacctgtaattctaggtacttgagaggctgaggcgggagaatcgatttagcccaggagttcaagtccagcctgggcaatatagtgagacccccatcttaaaaaatgtgtgtgtgtatatatatatatatataaattatatgtatgattatatatatatttataagttgtatgattatatatatttataaattttatgtatgattatatatatatttataaatttatttattttatttttttactttcgagacaaagtcttgccctgttgcccaggctggagtgcaatggtacaatcttggctcactacaacctccgctaaagtgattctcctgcctcagccctcccccacgcccggtagctgaacccggtagctgaatcctgagtagctgggattacaggtgccctccaccacacctagctaattttttttagctttagtagagacagggtttcgccatgttggccaggctggtctcgaactcctgacctcatggtcctcctgcgtcggcctcccatagtgttgggattacaggcgtgaaccatcacattcagccctatatgcattttagaacgggctttttttttggcggggggggtctctgttgcccaggctggagtgcggtggcacgatctcagctcattgcaacctctgcctcccaggttcaaacgattttcctgcctcagcctcccaagtacctgggattacaggcacctgccaccacgcccagccaattttttgtatttttagtagacacggggtttcaacatgttggctaggccagtctgaaactcctgagctcaggcaatcctcccacttcgacctcccaaagtgttgggattataggcatgagccactgtgactggctggtatttttatttctgaaaaaagaaaacaaaacaaaaaaaaccagacatgggattttgatagggattgtattgaatttgcagatcattttgggtagtagtaccttccaaataatgtaaagtcttttttttttctttgacacagagtcttgctctatcacccagactggaatgcagtggcacggtcttgactcactgcaacctccacttcctggtttcaagccattctcctgcctcagccttctgagtagctgggactacaagcgcatgccaccacgcctggctaatttttttttttgtattcttagtagagatgggattttaccatgttggccaggctggtctcaaactcctgacctcaggtgatttgcctgccttggcctcccaaagtggtgggattacagatatgagccaatgtgctggctttttttttttttttttttgaattggagtcttgctctgtcgccgaggctggggttcagtggcatgatctcggctcactgcaacctccaccttctgggttcaagcagttcttctgtctcagtctccggagtagctgggattacaggcacgtgccaccacacctggctaatttttgtattttcagtagagacagggtttcatcatgttagccaggctggtcttgaactcctgaccttgtaatccacccacctcggcctcccaaagtgctagggttgcaggcatgagccaccgcacctggccaaataatgtaaagtcttcgaacacatgaacacaagatatttttcaatttgtctttaatttcattcagcaacattttgttgtttttagtgtacaagtagtctttcgacttcttggttttgtaatttctaagcgttcaattctttttttttttttttttttttttgagacagagtctcactctgtcgcccagtctgggctatttggtgtcctgggttttatatttgttgaggctttttaaattattattattattattattattttgagatggagtcttgctttgttgcccaggatggagtgcagtggtgcgatctcagctcactgcaacctctgtctcctgagttcaagcgattctcctgcctcagcctcccaagtagttgggattacaggtgcctgccaccgcgcccgactaatttttgtatttttagtagagacggggtttcaccatcttggccaggctggtcttgaactcctaaccttttgatccacctgcctttgcctcccaaagtgctgggattacagatgtgagtcaccgcgcctggcctattcaattctttttggtgctattgtttgtggtattgttttcttaatttctttttcacattattcagttttggtgcatataaatgtagctgacttttttggtcttgagacagtctacctctgttgcccagactggagtacaatggtgtgatctcagctcactgcaacctctgcctcctgggttcaagtgattctcctgccttagcctctcgagtagctgggactacaggtgtgggctaccacacctggctgattgtgtatttttagtagagatggggtttcaccatgctggtcaggctggtcttgaacttctcacctcaagtgatctactcgcctcgacctcccgaagtgctgggattacaggcgtgagccaccgcacccagccccattgtttttcatatttgaaccatccttgcattttgcggataaatctctcttgatgatgtcatataatcctttaaatatgctgtcaggtatgatttgctagcatttatttgaggattttttgcattgatattcataaagggcatttgtagttttgttttttgtagtgtctgtctttggtgtcagcataattttgacctcatagagggagtttggaaatgtcccctcttcagttttggaagagtttgaggaggattgatagcaattcttttttaaatttttggtggatttcagcagtgaaactatttggtgtcctgggttttgtattcgttgaggtttttaaaattattattattattattttgagatggagtctcgttttgtcgcccaggatggagtgcagtggcgccatctcggctcactgcaacctctgcctcccaggttcatgccattgtcctgcctcaacctccccagtagctgggactacaggtgcctgcctccatgccagcctacttttttgcgtttttagtagagacggggtttcaccgtgttagccaggatggtctcaatttcctgaccttgtgatccaccctcctctgcctcccaaagtgctgaggttacaggcatgagccaccgcgcccagccaatttattatttttcttaatttattttatttttttgagatggagtttcactcttgttgcccaggctggagtgtaatggcatgatctcggctcactgcaacctccgcctcccgggttcatgggattctcctgcctctgcctcccaagtagctgggattaccggcgtccaccaccatgcccaggtaattttttgtatttttagtagagacggagtttcaccatgttggctagcctgtctcgaactcctgacttaaggggatccacccaccttggcctcccaaagtgctgggattacaggcatgagccaccgtgcctggctattttttttttattactatgccaatctcctgctactacagctctgttcagattttttgttttttcatgactcagtcttggtatattgtgtatgtgtagacatttgtccacgtaatcagttatataatttactgaagtattctaaaggacttctgaaattaagcctgagttgtacagttttttgtcctctgctgtatgtatgtattctgctgctgttgctgtgagtgtaaggggtgaggtgaggggaatcattctattgacctatgacttagcctcatttaaagataataggccgggcacagtggcttatgcgtgtagtcccagcactttcagaggcgaaggtgggcagatcgctttagcccaggagtttgagaggagcctgggcaacacagggagagcctatctctacaaaaaatacaaaaattagctgggtgtggtggtgcccacctgtagtagggaacaaggtgggatgatcacttgagcctgggaggttaagactgcaggggccatgattgtaccactgcactctagtctggacaacagagtgagatcctatctcaaaaaatattatatcaatctttatttatttatttatttggagacaaagtgtcactctgtcacccaggctggagtgcagtaacacaatcctagctcactgcaaccttgaattcctgggctcaagcaatcctcctgccttaacttcccaagtagctaggaccacagacacctgctaacataccctgctaatgtttttaaaaaatttttctagaggtggctataacttttaatttttttgttttttgaggtggagtcttgctctgttgcccaggcccaccatgccaggctaatttttctatttttaatagagaccagttttcactatgtaggccaggctggtctttaactcctgacctcaagtggtccaccctactactctacatgcctgctctgttattaaccaagttttcatatgaatactggcccattgaagactcttctttttccttgatctatttgtttatctctctgctaatagtatgctgtcctgaatgtgatggtttggaaatctttggtgttaggtaagccatccacctgctattcagaaggctttgacaattattagatgttaattcctgcacaccaggtggtgggaggtttggaaaagtagcttttgtttacctaaaatgtctgttttggggatttttttttttttttgagacggcgtctcgctctgttgcccaggctggagtgcagtggcatgatctcagctgactgtaatctccgcttcctgggttcaagtgattcttctgtctcagcctcccaaatagctgggactacaggcatgcgccatcacgcctggctaattttttgtatttttagtagagatggggtttcaccatgttggccaggctggtctcaaactcctgtcctcaagtgatccacctgcctcggcctcccaaagtgctgggattacaggtgtgagtcaccacacccagctgtattgggtatttatgaaattttgtaaggatatcatttggaagaagggacatcttattgagttttttctaggaacacatgttatctttccacttactccatactgctttgacattacctgacagaaattttaaaattcttccattaggacaattaaatattgatcatgaatcttatttactacttgattaaatttggtctagagtaaactgcttgcaagcttcaggatattctctcttggtataaccacatgggatgagctcagttccccaggggacaagttgtgacaacacgtgtgacatattgtctcccaggaaagctcattaaagactctgtgcccagagtgtttttctggggctagtgccctaggcaccacttctagtttggaacaaaagagtaggctttcagaaggaaaacagttcagtcagtaccatcctgtttgtcaataccataaaccgtttagccacagtaagccactttgtcacttaagttgatgggatccctctcgtagtctaagttgaccccgatagtagcaaaggtcgaacttggtaaacaggcctttctaaggatacccagactcaggactgctgaaatgagcgctgtctgcacaccaggtggtgggagtttgttgtgacaggtactagagattcactctgcaaagagcatttggggcaacgcagcagcacaactgactccctggacccaccacagagagggtggtcctcctctgtggctggctctctgagtaggtcagttctcacactggaactgctgcgagggaggaagtgcgtgtagataggaggaggccgatgactcaatcatggagtgagtgtttggagagcccggcgtcatgggatcactcatgtattgagtagagatccccagtgctgagtctcacccctcctcctccacacctgtgggatgtttcaggactcagtggcctttgaggatgtggctgtgaacttcacccaggaggagtgggctttgctgagtccttcccagaagaatctctacagagatgtgacgctggaaaccttcaggaacctggcctcggtcggtaagaaggacatttccttccttagtcaattagaagacaagtgtgttttggtcaccagtgtggttgcacagtttggaatgtggaaagagaatacgttggtgaataaatggggcatcgtgggccaggtacagtggcttacccttgtaatcctagtgctttgggaagccacggtgggaagattgcttgcgtccaggagtttgagaccagcctgggcaacatgatgagaccctgtctctttaaaaaaaaaaaaaaaaagtggggggtgggcaattgtggcagctcatgcctataatcccagcactttgggataatgttgagataatgttgagaaatgcagaagtattgctgggtgtgatggctcctgcctgtaatcccagcactttgggaggctgaggcaggtggatcacctgaggtcaagagtttgagaccagcctggtcaacatggcgaaacctcatctctactaaaaatacaaaattagctgggtgtggtagtgcatacctgtaatcccagctactcgggaggctgaggcaggagaatcactagaactcaggaggcggaggctgcagtgagcagagattgcatcactgcactccagcctgggtggcagagtgagactttgtctccaaaaaaaaaaaaaaatcaggcattgtggcagtgtttaatgaacttagaacctagtgatttttctgtaattttaaataattcataataatttctctgggtctacattttaggaatccaatggaaagaccaggacattgagaatctgtaccaaaacctggggattaagctaaggtaatctccactcacaagaggaagcagtgtctcttgagggaatcttagtaggtcaggaaaatttttaaaaaaatacaagacaaataagtacaatgttaggtttttaactgattattagaagattgctaccaaaaatctatccttcaatgtaatgtagatgttgagtgtctggacagggtactaagaatctgtgacatggatgtcactgtttggataactgctatggggagctgggtagcagaatcatcaatacacttcctttctaataattctgacccaggagaaaacctccacttttcctgattttggtagcagcataagtcttaagacatgtcaattagtagaaaagcattaataaaccaagcattgataatgcgtttgtcatttttcatagaagtctggtggagagactctgtggacgtaaagaagggaatgaacacagagaaactttcagccagattcctgattgtcacctgaacaagaaaagtcaaactggagtgaaaccatgcaaatgcagcgtgtgtgggaaagtcttcctccgtcattcattcctggacaggcacatgagagctcatgctggacacaaacgatctgagtgtggtggggaatggagagagacgccccgtaaacagaaacaacatgggaaagcctccatttcccccagtagtggtgcacggcgcacagtaacaccaactcgaaagagaccttatgaatgcaaggtgtgcgggaaagcctttaattctcccaatttatttcaaatccatcaaagaactcacactggaaagaggtcctataaatgtagggaaatagtgagagccttcacagtttccagtttctttcgaaaacatggaaaaatgcatactggagaaaaacgctatgaatgtaaatactgtggaaaacctatcgattatcccagtttatttcaaattcatgttagaactcacactggagaaaaaccttacaaatgtaaacaatgtggtaaagccttcatttccgcaggttaccttcggacacatgaaatcagatctcacgcgctggagaaatcccaccaatgtcaggaatgtgggaaaaaactcagttgttccagttcccttcacagacatgaaagaactcatagtggaggaaaactctacgaatgtcaaaaatgtgccaaagtctttagatgtcccacgtcccttcaagcacatgaaagagctcacactggagaaagaccttatgaatgtaataaatgtggtaaaaccttcaattatcccagttgttttcgaagacataaaaaaactcatagtggagaaaagccatatgaatgtacaaggtgtggtaaagcctttgggtggtgcagttccctccgaagacatgaaatgactcacactggagaaaaaccctttgattgtaaacagtgtggtaaagtctttactttttcaaattaccttagacttcatgaaagaactcatttggccgggcgtagccagtgctttggcaggaggcagggggatcacctgagcccaggagtttgagaccagcctgggcaacataagaaggccccatatcggctgggtacggtggctcacgcttgtaatcccagcactttgggaggctgaggcgggtggatcacctgaggtcaggagttcaagactagcctggccaacatggtgaaaccccgtctctactaaaaatacaaaaaaattaactgggcatggtggtgggcacctgtaatctcagctactcgggaggccgaggcaggagaatcgcttgaacctgggaggtggaggttgcagtgagccgagatcacgccattgcactccagcctgggcgacaaaagtgagactccatcacacacacacacaaaaaagccccatatcacgtggtggctcatgcctgtaaaaccagcactttgggaagccgaggtgggtggatcacgaggtccagagatggagactatcttggccaacatggtgaaaccccgtctctactaaaaatacaaaaattagccaggcgtggtggtgtgtgcctgtagtcccagctactcgggaggctgaggcaggagaattgcttgaaccagggacttggaggttgcagtgagccgagatcgcgccgctgcactccagcctggtgacagagcgagacttcgtctcaaaacaaacaaaaaaaagaaggccccatatctccaaagaaaaaaaaaattaactgggtgaggtggtgcatccctgtagttctagctgctcagaaagctgaggtgggaggaacccttgagcctgggaggttgaggctgcagtgagctgagatcgtgccactacactccagcctggatgacggtgacactctgtctcagaaaaaaagggaaagaaataattctcatttatacaggagagaaatcctatgaatgtaaggaatatgggaatacattcagtttccaaagatatgaaaagactaactggaaaaaaatccaaagacctcagatattccagttctattcagagccataaaaggactcatactggagaaaaattgtagaaatgtacagaatatggggaaactctcattgctctcatctccattcaaagacacgtgtcagtgcacactggagatggatggtatgaatcgaagaatacacactggatggaaacgttagtagtttggaaaatacaggaaacttccattttaacaataattaaaattcacatgggctgtgcacagtggctctcccctgtaatcccagcattttgggaggctggggtgggtagattgcttgaggccaggtattcaagaccagcctggcaacctggagaaatcccatgtatacaaaaaatagaaaagttagccagggatgatggtgttcgcctgtagtcccagctactcaggaagctgaggtgggaggattgcttgagtttgggaggtcgaggttgcagtgagtggagattgcgccactggactccagcctgggcaacagtgagaccctgtctaaaaaaattaatcatgtgagaacatccactcgaaagaaatcctataaacgtaagtaattttgaaagcctgatgcaaattaattattatataatgctcaaaaacttaatcatgaatgagttattacacaaagttataaatatatagcatttatcagtggctcattcttttttctttcttttttttttttttttttgagatggagttttgccctgtcgcccaggctggagtgcagtggcacaatctcggctcactgcaacctccgcctcctgggtgtgagcaattttcctgcctcagcctcctgagtaactgggattataagcacatgccaccacgcctggctaatttttttgtatttttagtagagacggggcttcaccatgtggttcaggctggtctcagactcctgaccttgtgatccgccctccttggcctcccaaagtgctgagattacaggtgtgagccaccgcgcctggccttttttttttttcccgagacacagtctcactctgttgcccaggctagagtgcagtggcgcgatcttgactcactgtaacctctgacttctgggttcaagcaattctcctgcttcagtctccgaagcatctgggattacaggcgcacgccaccatgcccagctaaatttttggtatttttgtagaaacagggtttttccacattggccaggctggtcttgaactcctgacctcaaggaatccatcctcttcagcctcgcaaagtgctgagattataggcatgagacaccttgcccggcccctgtgactcattcttaaaaaggatctttggattatgggtttccacttttgcaaggaaatgtgagaatgatactctttaagcagtggtacctgaggtttaataggaagtgtttttatcctaagttagttaataaaatttttttctatccattttggttttcatttttttctatccattttaaagtgttggatctgtgggtgaagtgaaatttatttctaatatgtaagcaggtttaatttttatgtagtgtttaattgttctgtgatgaatgggccattacaaaatgagtctatttttgtttgttttcttttgtttttgagactgagtcttgctctgtcgccaggctgaagtgtagtggcgcgatcttggctcactgcaacctccacctcccgggttcaagtaatccccctgccttagcctcctacaggcgcgtgccgacatgcctggctaattttttgtattttagtagagacggggtttcattgtactggccaggatggtcttgatttcctgaccttgtgatccaccccaccttggcctcccaaagtgctgagattacaggagtgagccactgcgaccggcccatgagtctttattaatagagatttcttactggtgttatgtggcagattctgcatattcctcacccatcatatgtattccactttcctttattatggggaaaactactctttttggcatgatacaatgttgactccattttctttgctaataaggacttggtatcaatttatcagtatgtaaagtttaccatagagtattgtctcatgtgaatcattcccattttttgctctttactctttgtcgttatttctgagtattatttggatggttcattttgacttaaggatagccctgtgatatgacaatatttttatctaatctgatggagaaagcatttagtctcctgatcaagtatgatgttagctgcaggtttttaataaatgccttaattcagtttgaagaagttcccttctgttcattatttattgagtgtttcatcaagttgtattgaacttttttgcatctattgggatgatcccctttttttttttttggaaacaaagtttcacacttcttgcccaggctggagtgcagtggcacaatcttggctcactgcaacctccgcctcccaggttcaagtgattctcctgcctcagcctcccaagtagctgggattacaggtgccctccaccacgactggctaattttttgtatttttagtacaggtcaggtttcaccatgttggccaggctggtctcgaactcctgacctcaggtgatctgcccgcctcagcctcccaaagatcctgtggtgtttagtcagttttgcattgctgtaaagcaatgcctgacactgggtaatttgtaaagtagagatttcattggctcacgattctgcaggttatagaggaagcatggtatcacatctgctgggtttctggtgaggcctcagagctcttactcttggcagaaggtgaagtgggagtaggtatgtcacaaggcaagagtaggagcaagggagagagagggggaggtctcagactctcttgagtgagcattcactcatccctaagggatggtgctaggccattcatgacggatcagccccaatggtatgatacttcccactaggcccaacagccaacactggggatcacatttctttttttttttttttttttttttttttttgagatggaggtttgctctgtcgccgatgctggagtacaatggcgcgatcttggctcactgcaacctccacctcctgggttcaagtgagtctcctgtctcagcctcccaagtagctgggattacaggcacaccactacgcccagctaatttttgtatttttagtagagataggttttcaccatgttggtcagcctggtctcgatctcctgacctcgtgatccgcccgccttggccttccaaagtgttgggattacaggtgtgagccactgtgcccagcctggggaccacatttcaacaagagatttggagaggacacatctaagtcatataattccacccctatccctccaaatctcatattctcatattgcagaatacaataatcccttctcaatagtcacccagagtcttaactcattccagcattaactcaaaagtcaaaagtctcacatgagactcatgaaatgaaatgtccatattgtgggggtgggggggcgggacggagtaaaactgccgggcctttgtatgcaatcagttaagttgttattagcttaaaatagacttcgagagctaagattctttatgtaaccctcatggtagcccagaagagaaaacctatagcagatacgcaaaagagaaaggaatcaaagcagaaaatcattaactctcaaagagagacagaaagaggaagaaaggaacaaaggatctataaaacagtgagaaaacagttaaaatgggaatagtaagtcttaacctatcaacaattactttattttttattttattttattttattattttttgagacagagtctcactctgttgcctaggttggagtgcagtggctggcgcgatctcagctcactgcaacctccgcctccttggttcacgccattctcctgcctcagcctcctgagtagctgggattacaggtgcctaccaccacactgagctaatttttgtatttttagtagagacggggtttcaccttgttggccaggctgatctcgaactcctgacctcaggtgatctgcctgcttctgcctcccaaaatgctgggattacaagcgtgagccaccatgcctggcctctatttatttagagacaagttctcgctctgtcgcccaggctggagtgcagtggcatgatctcacctcactgcaacctctgcctcccaggttcaagcgattctcctgtctcagcctcctgagtagccggggttacaagcacatgccaccacacctggctaatttttgtatttttagtagagacagggttttaccatgttggccaggctggtcttgtgacctcaagtgatctgcctgcctcaacctcccaaagtgctgagattacaggtgtgagccaccatgcttggccaacaattactttaaatgtaaatggattaaatttccaatcaaaatatatagagtggctgaatagatttttaaaacacatgaaaaacactactgaactataagctacctacaagagactcccttcattattattattactattctttgacacagagtcttgctgtgtcgcccaggctggagtacactggcacgatcttggctaactgtaacctctgcttcctgggttcaagtgattcttctgcctcagcctcctgagtagctggaactacaggcatgcaccaccacgcccagctaatttttgtatttttagtagagacagtgtttcaccatgttggctaggctggtctcgaactcctgacctcatgatctgcctgcctcagcatcccaaagtgctaggattacaggtgtgagccacgactcccttcatttttattttttattttttgagacagagtcttgctctgtcgctcaggctggagtgcaatggtgcgatcttggctcactgcaaactctgcctcctgggttcaagggattctcctgccttaggctccagagtagctgggattacaggcgtgctccatcacacccggctaattttttgtatttttagtagaaacggggtttcaccatgttggccaggctggtttctaactcctgaccttgtgatccacccgcctcggcctccgaaagtgctgggatcataggcgtgagccactgcgctcggccacgactcccttcatttttaaggatatactggtcgggcgcagtggcttacactttgggaagccaagacaggcagatcacttgaccccaggaggtcgaggctgcagtgagctgtgattgtgccactgcgctcgagcctgggcaatggagaccctgcctcaaaaaaaaaaaaattgtatatgcaaacaatgtaatattccttagccttataaaaggacatccttttacatgctacaacatggatgaactttgaggacattatgcagaaataagccactcgcgaaaagacaaatactgtgtgatcctacacagatgatccatggaaaattgtcaaattcataaaatcagaaagtgaatgttagctgctagcaggtaaggaggagagggggaagtgaggagctgttattcagtgggtacagagtttcagttttgcaagatgaaaactttctggagattggttgcaaccccaggttagtatagttggtattactgatctgtacgcttaaaaatcattaaggactgggcatggtggctcacacctgcaattccagcactttgggaggctgaggcggccagatcacttgaggtcaggagttcgagaccagcctggcaagcatggcgaaaccctgtctctactaaaaatacaaaaattagccaggcgtcgtgacacatacctgtaatcccagctactagggaggctgaggcacgagaatcgcttgaacccaggagatgaagttggagtgagccgagatcgtgccactgcactccagcctgggacacagcaagactatgtctccaaaataaaacaaaataataaaaaatatataaaatggacatacacacatagcccttcagacaaacaaaatcacgaccttgtcactgcacatacagctgcagacacaaccaactcacaagccctccagagtaatgtcccagtgacaccaacggattcccccaggcaggcagagcccaggcccttggcactccatccctaccggcactccatccctactgctttccctccctcctggggactaaggcccacctgatacatttttaaatatatatatatataatatattttatttatattaaatattaatatatttttatttatattaatatataaataaattatatatttatctattacattaatatttatctattacattaatatatatttatctattacattaatatatatttatatattacattaatatatatttatatattacattaatatatatttatatataagttatatatttatatattaatatatttatatatgttatatatttatatattaatatatttatatataaatatataaaaattatatataatataatatataaatatattaatatatttttatatctaaatatatatttatatatataaataaattaatatatttatatacaaataaattatatatttatatacaaataaattatatatatatacaaataaattatatatatacaaataaattatatatttatattatatatttatatacaaataaattatatatttatatacaaataaattatatatatacatatttatatacaaataaattatatatatacaaataaattatatatttatatatacataaattatatatttatatataaatatattatttatatataaatttatatttttatatataaataatatatttatatttatatataaataaactatattatatatttatatataaataaattatatatttattatatatttatatataaactatatattatatatttatatataaactatatatttattatatatttatatataaactatatatttattatatatttatatataaactatatatttattatatatttatatataaactatatatttattatatatttatatataaactatatatttatgttatatatttatatataaactatatatttatgttatatatttatatataaactatatatttatgttatacatttatatataaactatatatttatgttatatatttttatataaactatatatttatgttatatatttttatataaattatatatttatgttatatatttatatataaattatatatttatgttatatatttatatataaattatatatttatgttatatatttttatataaattatatatttatgttatatatttttatataaattatatatttatgttatatatttttatataaattatatatttatgttatatatttttatataaattatatatttatgttatatatttatatataaattatatatttatgttatatatttatatataaataaattatatatttatgttatatatttatatataaataaattatatatttatgttatatatttatatataaattatatatttatgttatatataaataaattatttatttataaatatataaaattatttatatatttatatatataaattatttatatatttatatatataaataatttatatatttatatatataaataatttatatatttgttatatatttatatataaataaattatatatttgttatatatttatatatatttatacagaaatataatttaaaatatatatatttatatataaatatattttaaattatatttatatatttatatataaatataatttaaaatatatttatatataaatataatttaaaatatgtatttatatatatatattttttgagatggagtctcgctctgtcacccaggctggggtgcaatggcgcgatctcggctcactgcaatctctgcctcccgagttcaagcgattctcctgcctcagcctccagagtagctggggctacagctactcataaagttatgagacctcatatctttttttttttttttttttttttagatggagtctcactctgtcgcccaggctggagtgcaatggcatgatctcggctcactgcaacttccacctcccgggttcaagcaattcttgtgcctcagcttcctgagtagttggaattacaggcccctcccaccacgcccagttaatttatgtatttttagtagagatggggttttgccctgttggtcaggctggtctcaaactcctgacctcaggtgatctgcctgcctcggcctcccaaagtgctgggattacaggcataagccactgcgcctgtcccagagacccccatatcttaaaaaattaaattagctgggtgtggtggcgtgtgcctgtggcctctgaggcaggaggataacttgaggcctgaatttgtgactagcctgggcaatatagtgagacctggtctcttaaaaaaatactaaatctttatcatttacaaagaaatgggaactctgagaccccaccagtttaaataagtttacgtggcccaatgtaagttaaacagggtgttccaggattggaatttatttttaattttagagatggtctcactctatctggagtgtggtggcgtgatgatggctcactgtagccttaaactgggctcaagcgatcctccagcctcagacttccaagtaactgggaccacaggctctatcaaccacacttggctatctatctatctatcatctgtctatctgtctgtctgtctgtctatctatctgtcttatctatacagagtttcgctcttgttgcccaggctggagtgcaatggtgtgctctcagctcactgcaatctctacctcctgggttcaagcaattctcatgcctcagcctcccgagcagctggggttataggcttgagccaccactgcctgctaattttttgtatttttagtacagatggggtttgatatatgggttaggttggtctcgaactcctgtccttaagtgatccacctgccttggcctcctaaagtgtttggattacaggtggagccattgcacctggccagataaaagtttatactgctctttttctctctagttttttttttttttttttttttttctagacagagtttcactctttttgcccaggctggagtgcaatggcgtgatctcggctcaccacaacctccacctcccgggttcaagtgattctcctgcctcagcctcctgagtagctgggattacaggcatgtgccaccacgcccggctaattttgtatttttagtagagacgggggtttctccatgttggtcaggctggtctcgaactcctgacttcaggtgatccgcctgtcttggcctcccgaaggaccgagattacaggcatgagccaccacgcccggctttcttttttttttttttgagatggagtctcgccctgttgcccaggctggagtgcagtggtgcaatctcggctcactgcaaccgctgcctcctgggttcaagtggttctctgccccagcctcccgagtagctaggattacaggcacccgccaccacgcctggctaatttttgtatttttagtagagacggggtttcaccatgttggtctggctggtctctaactcttgaccttgtgatctgcctgcctcagcctctcaaagtgctgggattacaggcgtgagccaccacgcccgcccggccctctctagtttcttaaggtggaagattacattattattattattttttgaaacggagtcttggtctgtcacccaggctggagtgcagtggtgcgatctcggctcactgcaagctgcgcttctcaggttcacgccattctcctgcttcagcctcccgagtagctgggactacaggtgccagccaccacgcccggctaattttttgtatttttagtagagacggggtttctccgtgttagccaggacggtctcgatctcctgacctcgtgatcgcccgcctcggcctcccaaagtgctgggattacaggcgtgagccactgcgccagcccaagattacattactgatttaaatatttcttttctgatgtatatatccaatgctctaaatgtagctctaagcactgtttttgctatatcctccccacccccgctttttttttttttttttttttttgagatgcagtcttgctctgttgcccaggctggagtacagtggtgtgatctcggctcactgccacctctgcctcccgggttcaagcgattcttctgcctcagcctcctgagtagctgggattaccggcgtgcgcctccacacctggttaatttttttttttttgtatttttagtagagatggggtttcaccatgttggccaggctggtctcgaacccctgccctcaagtggtccacccacctcagcctcctaaagtgctgggattacaggcgtgagccacctcgtccagcatatcccacaattttttttttgagacagagtcttgcttaaagttcaaaatcagtaaactggacacacttaactactattattattttcaagacggagtatcgctgctctgttgcccaggctggagtgcagtggctcgatctcggctcactgcaacctctgacccccaagttcaagtgattctcgtgcctcagcctcctgtaatctcagctgcgattacaggcgtgtaatctgtgcctggcctcattcaaatcatgacctaccgcgcctggcccagctaaatttttttttgtttatttttttgtagagatggtctcctttgcccaggctggtctccaactcctggatgcaggccatcttcctgccttgacctcgcaaagtgctgggattgcaggtgtgcacctggcatggttatggtttaacattatgaatataattcatgccacagaatggtgcacttaaaatggataaaataaaattttgtatgaaaaaccctttagctctatgaaacacccagttaggctgggcacggtggctcatgcctgtaatctcagcactttgggaggccgaggtgggaggattatttgaggtcaggagttcgagaccagcctggccaacatggtgaaaccccatctctactaaaaatacaaaaattagccgggtgtggtggcgggcgactgtaatcccagctacttgggaggctgaggcaggagaattgcttcaacccaggaggtggaggttgcaatgagctgagattgcgcctctgcactccagcctgggaaacagagtgagactctgtctcaaaaaaaaaaaaaaaaaaaaaaggagaaaagaaacaaccagttaagatgatgaaataagctcctgagtgggaaactattttcaaactacacatacagcaaagaactactatcttgaatatataaaaaaactgtcacccttgtttagaaacacagacatctaacagtgatgtcaccgtatataataaagggattctaggtttgagccaccactcctgactcttaagagaattttgaaatgtaaaaagccatgatatctccaaggcaatcaaattcctattctcactggtatatttaagaaaaacaggtcacacgcatttgctcacatctgtgatcccagcactttgggaggccaatcgcttgagcccaggagttcaagaccagcctgggaaacatagtgaaatcccatctgtattaaaaataaaaaaattagcagggtgtggtcacctgcttctgtagtctcacctactcaggaggctaaggtgacaggattgcttgagccaggaggtgaaggctgcagtgggctatgattgagccattgcactccagccttggtgacagagtgagactgtcaccaaaaaaaaaaaaaaaaaaaaaaaaggctgggtgtggtggctcatgcctgtaatcccagtactttgggaggccgaggtgggcggatcacttgtgatcgggagtttgagaccagcctggccgatatatttggtgaaaccctgcttctactaaaaatacaaaagttagccgggcgtggtggtgcgcgcctgtaatcccagctactcaggaggctgaggcaggagaatcgcttgaacccgggaggtggagattgcagtgagccgagattgtgccactacactccagcctgggcgacacagcaagactctgtctcaaaagaaaaaaaagaaaaaaagaaaagaaaaaagaaaaacaaaaaaggggtacgtaaatttggcataaacctggaaactcaatactgttaaattggaccaaaactcctaatgaatttacttatttcaaccactttattcaaatatacatatcctacacaatacacccagttaaagtgcataattcataggtatagtatattcacagatacatgcaatcatcaccacagtggatttgcatcacctcaaagagaaacccctgtaccctttaggtatccactcccccaatcctcccattttttttactcaacacccagccctaggcagtcagcaattgactttctttctcagcagatttctctgctctggactttcatgtgaatgaaatcataccatacggggaatttttaactgggtttcatttactatagttttttgaagggatatccatgttgtagtatggtcctgtacatcatttagatttatgatggaattattaatattttccattgtctggctattacatattttatccatgcattcaatgatggattatttggtttccaccttttggctgtcatgaataacactgctataaacattcatgcccaaggtcttgtgtggacatatgtttctatttatttctacctacaacaaaaactgatgtcacatggaaattctgtttagtagtttcttttaaatttaaaaggtttgaagatttattatttttttcttgtggcaaaaactcttaagattaaatataacggctgggcatggtggctcacgtctatcccagcactttgggaggctgaggcaggtgggtcacctgaggtcaggagttcgagaccagcctggtcaacatggcgaaaccccatctctactaaaaatacaaaaattagttgggcatggcggtgtgtgcctgtaattccagctacttgggaggctgaggcatgagaattgcttgaatctgggaggcggagtttgtagtgagccaagatcatgccactgcactccagcctgagcaacaagagcaaaactctgtctgaaaaaaaaattaaatataccaagttaaccccaagtgtataggtcagcagtgttaaatctattcacactgttgggcaacagatcttcagaccttttcaatcttgcaaaacctaaaatctatatccattaaacactacttccaactgcccaccaccccagccccattctacagcccccattctcagcaacaaccttgctgcactgtttctgcattttgactacttcagctagtccatatgaatggaatcctacagtatttattgtttgatgactgcctcatttcactcagcctaatgtcctcagggttcatcggtgtcgtaccaactgacaaagtttctttctcttctctttgagatcttgttgtgaaatctctgggatatacacccagaagtggaattactggatcatatggtcataccatttttcttttttttatttatttttagatggagtctcactctgtctccaggctggagtgcagtggcatgatctcggctcactgcaacctccatctcctgggttcaagccattctcctgcctcagcctcctgagtagctggaattataggtgcgcaccaccacgcccagctaatttttgtatttttagtagagatggggtttcaccatgttggccaggatggtctcgatttcctgacctcgtgatccacccgccttggcctcctaaagtgctgggattacaggtgtgagccaccatgcctggccttcatttttttacaacctgttcttcacaatgctgtttttcataatggctacaccactttacaatcccaccatcaatgcataagcaccccaatatctctatgtcttcaccaaaactttttatttatttatgtattatttattgagatggagtcttgctctgttgcccaggctggagtgcagtggcatgatcgcagctcactgcaactgccgcctcctgggttcaagtgattctcctgcctcagtccccggagtagctgggattacaggcatgtgccaccatgcccagctaatttttgtttcaccatgttggtcaagctggtctcgaactcctgacctcgtgatccgcctgcctcggcctcccaaagtgctgggattacaggcatgagccaccgcacctggccggctattctttttttaaattattattattattattattattattattattattattatagttctggcctgctattctgatgttcgccattctaattggtgtgaggaaatatctcattatgtgctttttttttttttttaagacagagtttcttgttgcccaggctggagtgcagtggcgtgatctcagctcactgcaacctacgcctcctggttcaagcgattctcctgcctcagcctccccagcagctaggattacaagcatgtactaccatgcccagctaattttgtatttttagtagagacagggtttcaccatgttggccaggctggtttcaaactgctgacctcggatgacccacctgcctcggccttccaaagtgctgagattacaggcgtcagccaccatgcccgacctcattatgcttttaatttgcacttctcttatgatctctgatggtgagtgtgtgtgtacagatatttcaatggcatccttttgtattttgcaaaaacagggagtatatatatactatttttgcaaaatagcagttgaaattttggtgcagattgtattaaatctgtagaccactttgggtagtggagacatcttaacaatattaagtcatctgggctggatgcagtggctcacgcctgtaatcccagcactttgggaggccaaggccagtagatcacttgaggccagtttgagactagcctggccaacatggcaaaaccctgtctctattaaaaatacaaaaattagccagatgtggtggtgcatgcctgtaatcccagctactcaggaggctgaggcaggagaattggttgaacccaggaggctgaggttgcagtgagccgagatcgtgccactgcactctagcctgggagacacagtgagactgtctcaaaaaacaaaaaaacaatataaagtcatctgatctatgagcatggaattctctgagaatacagaaaaacacaatagttctttttcttattctcaaacaataacatgcaacacttctgcgaccagatgtgggggctctttccacacacaccaagcaagcaagtctgcagagcattcctctccagcagacaccaggaggctgccccctaactgaactaaattctgatgctacttggagatagcatcagattccacaggttcaggtcccagtgccataagactgccctcacctcacgtgccagttaattaattaattaatttttttgagatggagtcttgctctgtcaccaggctggagtgcagtggtgcgatcttggctcactgcaacctccacctcccacgttcaagccattctcctgcctcagcctcccgagtggctgagactacaggtgcctgccaccacgcctggctaatttttgtatttttagtagggtcagggtttcactgtgttggccaggatggtctcgatctcttgaccttctgatacacctgcctcggctgcccaaagtgctgggattacaggcgtgagccaccgcgcccagcctggaattcttaacaggaccattaggattaaataaattttactgggggtctgaagaaatgatgtaatcaagcgcccggcttgattacatcattggatattggtgatagacttaaacttcagcacctctctcctccaggtgaggcagggaacttaaggccaatttgtgctgacttcctaaagctgggtcaaaggaaaacaccaaggtcttggggcagagaatctaaggccaattaacgccaactgcctaaagctaaaccaaaagaaaaaaccccatctccccaagcctggagcagcaaaggatggaaggctactttccctccagccctcccacttccaccaacatctcagatggaaagtgccctggattggctgcgggccaagcatggcccatcccttcatcttcagagggcaccaattcacctcagcctttaattagccaccagccaaatccttcatccagataaggggtaactgatggggaccttgaaaggagtacttaaaacccagaaaactttgtaactggtcccttgagctgcttgctcgggctcacttccaccctgtaatgtgctttctccctttaataaatccttgcatttgcggcttcggtcctgggtttcgttcctttgtgtgttttcttcagttctttgttcaaaaactccaaggacctggacaactcacactcatggccttccttccagtaacacaggggagtcaggggtgaagcagagtatcctaaccatctaatcacatggttgtttcccctggcaaccaccccatcctgaggctatgcacggcccgcagtcactagtcacctcaacatcactttgattccaaggcttttaggagctgtaggccaaggaaacaggaacaaaccaaaataaatatttcataatatcacagatgtctttctaggtatttgtatctttctttcttttttttttttttgagatggagtttccctcttgtcgtccaggctggagtgcagtggtgtggtcttgtctcactgcaacctcttcctcctgggttgaagtgattctcctgcctcagcctcctgagtagctgggactacatgcacgcaccaccacgcccggctgatttttgtatttttggtagagacggggtttcaccattattggccaggctggtctcaaactcctgacctcaggtgatccacctgcctcggcctcccaaagtgctgagattacaggtgtgagccactgcgcccagcctctttagtttcttttagcaatgctttgtagctttcagtgtagaagtcttttattttcttggttacatttattctcaagtatttgtttttgtgccattgtaaatgggattgttttcttaattttcttttctgcctggtcaccactagtgtgtagaaacacaattcattattatttttcttgctgattttgtttttttcgcctttgctgaaatcccatagagtcagccctccatattcctgggttctgcatctatggattcaaccagctacgaattgaaaatattcagaaaaaaattggatggctgtgtctgtaatgaatatgtgcttttttcccccttattatctcctaaatgacttattataaaaactatttacacagcagttgcattgtattaggtattataaataacctacagatgatttaaagtatataggaagatgagtgtaggttatgagaaaagaacttttatctgaagaatgtgagactgtggcaggccaggtctcactaacgcaggcctccataacaactgtttcagtactgactgagtggttaagttaaatattaaaagccagcgcccttacataagggctgggatgtaacaaaagcccaccaaaaagtttctcctaggcctgcctttcttgggctttaatgcatgacaacaataatgaaggaatttttttttttgagatggagtctcactctgttgcccagctgcgatctcggctcactgcaacctctgcctcccaggttcaagcaattctcccgcctcagcctcctgagtagctgagactacaggtgcccgccaccccacccggctaattttttgtatttttagtagagatggggtttcaccgtgttagccaggatagtctcgatctcctgacctcgtgatccgcccgcctcggcctcccaaagtgctgagattacaggggttagccaccatgcctggccaagaagttgttttatcttgtttactgctgaaggtgtcagggtaaggggggcccaggtgggctgaagtttcctcttgctcacagcgcagacagttgcccggactaaggaagccgacatctttgctgtcctggcgctccggtacctccagccagagctcggccgcctcagcctctctccatggacatggcgggcgcatccagttcaaagaatttttaaatttccatcttgatttcatccaacgctcatccagaaacaggttgatctttaatttttaatttaatttccatgtatttaatttctaaaatttatttaatttccatgtatttgcatggttttgatggttcatttggagttgattttcacttttattccactgtagtctgagaaaatagttgatataattttgattgtcttaaatttattgagacttgtggcctatcatatgtctatcttggaaaatgtttcaagtgctgatgaataaaatgtatattctgcagttcttaggtagaatttctgtaaatattttttaactccatttgttctaggatatagttctaagtccattttttgttgttgttgttgttattattgactttctgtcctgatgacttgtctattgctgtcagtagagtattgaagtccctcattattattgtgttgtcatctatttcatttcttaggtctagtagtaattattttataaatttgggagctccagtgttaggtgcatgtatatttaggattgtgatatttccctgttggactagtcctcttatcattatataatgtccctcgttgtctttttttttttttaactgtttttgttttaaagtctgttttgtctgatgtaagaatggctactactgctagcttttggggtacatttgcatggaatacctttttccaaccctttgccttaagtttaagtgagtccttatgtgttgggtgagtctcttgaagacagcagatatttggcttgtaaaatcttttttttgagttggagtttagttctagtccaggttggagtgcaatggcgtgatctccgctcactgcaacctccgcctcccgggttcaagcgattctgttacctcagcctcctgagtagctgggattacaggcattcaccaccatgtctggctaatttttttgtatttttagtagagacagggtttccccatgttggtcaggccggtctcaaactcccaacctcaggtgatccgcccacctcagcctcccaaagtgctgggattacaggcatgagccactgcacctggtctggtaaactcttatccattctgccattttgtgtcttttaagtggagcatttaggccactagattagtagcatttaggccaataatcactatcaattacaccaccatacattacaatgcctgtcattgaaaggcttgaacacgttgtaatccattcatctgtattcaagtttgcagttatggtggaaactttggcctattgatcatcctgctgattaaatagtctgtcaagagaaagcagagatgcatgagcatcaacatggaaaacagtgataatggtagtgtgtgccaggattcagatatcttcccagtattgttttccccaaacctctttattcccaactaaccatttgttttgttaccactggggtttccaggtagtaagaccatttgctactgaccaagagttggtatacaagtgacaaatccttctggcctcctcttgaatagctcggaggatggctactagttcagctaactggctgttcccacccctttcttcatcagaaatgtttatgtttttaacaggattataagccatggccttctagtatctggtcccaccaatgtatttggtggatccatccataaaccaagcatgtttctgatcctctgggcatagttctttgaaggatctgccccattgggcaggggaggtttccttccctatctgcaggacttgctcggtgatttcctgagctgggaagtttcgtacatcctcatgtaaaagtgataccctctttggttttggtttagatgggggacttgtatatcacaagtagctgtaaattaaccgctaatgctgcaccagacactataacccatgtcctatagcttaacaatggatagccaattactaatcaatgtcatttctgtaagccaatgagaattcctgacgactttataccagccactccctgtaccccattttgcctttaaaaacctgcttgtggccaggtgtggtggctcatgcctgtaatcccagcactttgggaggcagaggcatgcagatcacttgaggtcagaagtttgagaccagcctagccaacacggtgaaaccctgtctttactaaaaatacaaaaattacccgggtgtggtggcaggtgcctgaaatcccagctactcaggaggctgaggtgggggaatcgcttatacccaggaggtggaggttgcagtgagccatgattgcaccactgcactccagtctgggtgatagagtaagactctgtcgcaaaaaaaaaccaaaaaccaaaaaacaaaaaacaaaacacacgcctgcttgtgacaaaggcggaacggagttcatatccaaggtcacttgggtccgagtctcccaggaagctgttctctctttggctccagtaaacttgttaaattatacttgtgcctcagcctctttcttttaggttggaattttttttttttttttgagacggagtcttgctctgtcacccaggctggagtgcagtagcatgatctcagctaactgcaacctctgcctcctgggttcaagtgattctcttgccttagccttctgagtagctgggattacaggcacatgccaccacacctggctaatgtttctatttttagtagagatggggtttcaccatgttggtcatgctgatctcaaactcctgacctcatgaaccgcccgcctcggcctcccaaagtgttgggattacaggtgtgagccaccacgcctggccttaggttgacatttctataaaaatactgtgccattttatataagggccttgagtttccataaattttggtaccaaggggcacaatggagccagttccccagggatactgaagaactacattaattttaagttttaaaaatggaatctttcttttttctttagacagggtgtcgctctgtcacccaggctggagtgcagtggagcaatcttggcccactgcaacctctgcctctgggcctcaagcgatcctcctgcctcagcctcccaagtagctgggactacaggtgtgagccacgacacttggttgatttttgtatttgtgtgtgtgtgtgtgtgtgtgtgtgtgtgtatatgtatagttttttttttttttgtaactgtctctgttggccaggctggagtacagtggtacaatctcggttcactgcaacctctgcctcccgggttcatgcaattctcatgtctcagctttcctgagtagctgggactataggtgcgtgccaccacgcccagctaatttttgtattattagtagaggtggggtttcagcatgtgggccaggctagtctcaaactcctgacctcaagtgatctacccacctcggcctcccaaagtgctgggattacaggtgtgagccactgtgcttggccaagttttgtattttttgtagagatagggtttcaccatgttgcccaggctggtcttgaactcctaaactcaagcaatttgccctcctcggcctcccaaagtgctgggattataggcatgagccaccatgactggcctaaaaatggaatctttagggatttcttcacagggatcttgccattaacaaaaagagataattttacgtattcctgtccaatatggatgccttttttttttttaatcatctaattggtctgcgagggccggtggtatgtccaacaggagtgtccttttaaagttttgtcttttactgctgagtatggtgttagctgtgttttcaaatacggcttttattatgttgagtatttttcttctattcctagtttgttaggttgttctttttttaatcaagaaaggggtgttgaattttgtcagacgcttttagtatacattcagtttccaaatggctcaaattatggacttttgtttcaggtttttttgttggaataaagaaaacaaaaatctatcttccttccttcactgtggtttttttttttttttttgagatggagtttcgcccttgttgcccaggctggagtgcaatggtgcgatcttggctcactgcaacctctgcctcccaggttcaagcgattctcctggctcagcctccctagcagctgggattataggcacccgccaccaggcccagctaatttttttgtattttcagtagagacggtgtttcggtatgttggccaggctgatctcgaactcctgacctcagacgatccacccacctcagcctcccaaagtgctgggattacaggcgtgttgcaccgcgcccggctctccttcactttttgttttctgctcactggaaatactctggggaggggagggccctctctactacagcatgtgttattttttttcctccagagatcttcaaataactactatcagttaggggcctcctgcatggtgagagatgctttgtgtggtttaaggacacaaggctttatttaggtctgaactaacatctttgctgaactaaaggatgccatgagggttatttctgacaaccttggaggatctgggtctttgttgcgttagaggcgtgagcagcaacagcagcagcagaggtatttaagggtcctggagagtgtggacctcaagacaccatctaatagcagcttcccagtccccactctttttgttctttctgtttttcagatgactactttttcaggaatgactacttgatgggcccacaacttgcacagaagaaaaaaaatctccccaccagcctgcaccctagatgaaggccaatacccagcattagtcacagcttcattctaaaatacacagccacagctaggccgggtgcagtggctcacacctataatcccagaattctgggaggccgaggcggatggatcacttcaggtcataagttcgagaccagcctggccaacatgatgaaaccccatctctactaaaaatacaaaaattagctgggtgtggtggcatgctcctgtaatccctgctatttgggaggctgaggcaggagaatcacttgaacctgggaggcagaggttgcagtaagccaagaacccgccactgcactccagcctgggcgacacagtgagactctgtctagaaaaacaaaaactaaaacaaaaacaaaaaaaccacagctaggtcccagccaaaacatatgacccaggactgtgtaagaggggctgcaatcagctgggtgcagtggctcacacctgtaatcccagcactttgggaggccaaggcaggtggatcacctgaggttgggagttcgagatcagcctgaccaacatggagaaaccccgtctctactaaaaatacaaaaaattagccaggcatggtggcacttgcctgtaattccagctacttgagaggctgaggcaggagaatcgcttgaacccgggaggcggaggttgtggtgagcggagatcgtgccattgcactccagcctgggcaacaagagcgaaactccatctcaaaaaaaaaaaaaggggtggggggtgctgcaatcccatacttctgctcctcaatgtaaaggaattatgcaaactgctgacttacctcagctgaatccggaactgaggctggctaggcctcagcaatgcaacacagggcagcaagcagcagctcaaagtacacactggctgctgggcagcagagcaggttagcaacctggacgagagaacagacctgtggcgtggtgaccagcatccagacatcttgttcatggtgacaactgccagtgtcacctgaaaacgtggttctgatgttgacacgcagaacatgtggttctatgtggcagaaacatagtgagtgagtataaaaaggcttattacataattgaggtctcagggcaggactcacaagcagctgtgaaatggcttgacagcaaggaagattgcattaattcctactgtgaatggtgatgcaggaatcctgaaataaacaccagcaaaccataggaagcaacatattaaaagcattacataacatagccaagtgagatttattcttggaacataaaaatggttgaaaatatgaacactgatcattgtcatataccacattagcaaaatgatggaaaatgacaattatctcaattgatgccatatatgaaaaacccacatcattttgatggtgaaaaactggatcaggaaaaaaaggatgtatgcactaacaggttgttgttgttgctgttgttttttgagacggagttctcactctgttgtccaggctggagtgcagtgtcaccatctcagttcactgcagcctccacctcccagaggttcaggtgattctcctgtcccagcctcccaagtagctgggactacaggcagatgccaccgcacccagctaatttttgtatttttagtagagacggggtttcaccatgttggtcaggctggtctcaaactcctggactcaagtggtctgcccgcttggccgcccaaagtgctgagattacaggcgtgagctactgcgcccggccctaactagttttactctatgtgttaagggagatgctgtcagggaaatcaggcaagaaaatgaagtgaaagcaatctagattaaaaaatatacacacacagcccccacagcctcccagaccaacaagagatcataaccattttcactgtacacacaggtggacacacccagagacagacacataaactcacaaactcacagataaaaatggcccagagataccaacagatgcttgcagagacacacagaccccaggcctgccccctctactccaggtttctctccttcctgaggaataaccactatgatctactgtatatttttgcttattctcatgttctcttctagaatgtcaggttggaggagacagggatattagtgtagatttgttcattacaccaactagagaacctgttatatcaaggagattaatacttattgaatcggccaggtgtggtggctcatgcctgtaatcccagcactttgggaggtgggcggatcacctgaggtcaggagtttgagaccagcctggccaacatggtgaaaccccatctctacgaaaaatataaaaattagtcgggcatggtggtgcaatcccagcactttgggaggtgggtggatcacctgaggtcaggagtttgagaccagcctggccaacatgatgaaaccccatctctactaaaaatataaaaattagtcaggcgtggtggagtagtaatcccagctactccagaggctgaggcagaagaattgcttgaacccgggaggcagaggttgcagtgagccaagaccatgccattgcattccagcctgggcaacaagagcgaaactctgtctcaaaaaaacaaaacaaaacaaaaaaacacttattgaattgtaggactcaaacagacacacaaacaggttttacacaaacctcgccataagctcacatacacttaatcttcaaagactgaattgttctcacccacatcccatgtggcagagaggtgcttccggcccccaagcctctcacaaaaagtggctccttagcccatgctgatggggaagacattttacaatacttgagcatatagactctaagaagtgcttttctgtaaaagtagaaaatgggagttcaaggatgcaaaagggctggaaatggattgatgctgctgctccagcccttcaactgttataaattgtagatgattccagaaacatccctcatgacttgaccgtgtgtcagtttgcttttccactgagagcacaatgagggcagcaaaggcgtggatctcatggctcagctgcatgccctcctctgagctcttcctggtagctctcaccttcactaagggctcatctgccagcagacctcgccccagatggcctcacgggaccccaccatgctcaagccttgcaaggctgccccctgacccacatctgctgttggggtaggatggaggcctacaaaactcagactaaacatcttgaattgacagaaatatcacttctggtatccagggagagacaggaagttgttgtgaggttggatggtgagctggcttccctcattcctgccacatccctggcaggacactctgacttgctatccaggtaacagtgggcactgcctccaccaaaggaagggcctgacacctaccatggctgcacagctcagcaaaggaggaactcttcggtgctgtcaggacagtttcttgggagttcagtacaccttgcattctgggagtgacatgaagcgagtcggctccatggccggtgccgcctctctgatatagcggcttcccgtataccacaaggctggagttctgcagggtgggttctgttccacgaagcactaagtgctggccttggaggcaaggctacgaaaccagccctgcagcagcacacgtgacacgcactgaggagaaaccttgtcattgtcagtgcctaagccaggtggaatgtgccagaaaatctggggtgggcaaattagggaaggtaagaagttgatcgtgtcctgcagtctatggccatactaccctgaacgtgcctgatctcgtctgactgtgttctgtagctgggacatggtagggcatgtctctatgatgccacagttggttttgagacttctgtggtggttggtgcagagctggtggttatgggacagtggatcttgtatggtcaaggggcatgacacacattctgccacagcttcttcagccctcactttagagctacctgggttgtcacagaaaaatggtctagtgtgaacttttatttatttatttattttttttctctttttcttttttttttgagacagggtctgtctctgtcacccaggctggagtgcagaggtgtgatcttggctcactgcagcctccgcctcctgggttcaagtgattcttctgcctcagcctcatgagtagctgggataacaggcacgtgccatcacacctcgctagttttttgtatttttagcagagatggagtttcaccgcattagccaggatggtctcaatctcccgacctcatgagctgcccacctcgacctcccaaagtgctgggattacaggtatgagccaccgtgcccggccttagtgtgaacttttaaatgcatttaccaacaagaatccacagtgtgggtttggatgggaaacggagctggacatgacctccagacggccttggaataacatgatgttgacagccatgaattagggtgtccacaggcagatcccactggagaactgtgggatgtacctttgttttcagaaccacagcatccccaaagatctgacccaaggacactgatgaaaagttcaaaggcagattgtgggagccctctcaattctgtgcagtcacgtacgtaagctaagggctgggagtgtttcttaacttcagacggggttccaagaaaggcctgttgggacccaagtcctttctcctcagtccttcaatttgtcctaaggcagtggaaagggttgcatatgtacttgaagacatttccatattgcttacattcaagaagctgctcttaaatgtgtgcatggtttcatggtctcaaaatgaactaggatgcacaagaaactcagaaatgacagaaaagttaaatgaatatgaaactgaagagtttagattccacggatatttaaaaaccagtcaacttgaaatggatattcagattaaaaagataaaacataagactgataatcttatagcagaactggaaggtgcatcttcaaaatgtctgtatctggctgaaaacaatcaagttcttcaacaggaattattatctatgaaaacgatacaacagaaatgtaaagaatttgagaagaataaaaaggtgttggaacaagaagtgagaggagttagctagcttgcctcaggtaaacagcaagggaagggtttttggagagcccccgacccactggttagtgccttattcccacatataacaaggtctctgattggattaaaaaataataataattagcacagggagtcatgcctagagatatgcccacagctgcacagatagaacttttagcccactcagataaggaaacttgcacaaacctttagcccacttaaataaaggaacaaggcccaacatagaaatgccttagtcctttgtataattagtgggcttccaggaaatagcctctactccttttatgggcatatacctggtgggctctggtgggttctggtgggcacttcctttttttaaacattctttagcctctatgaatcatcacttcagcctctgattggtcccaggccaaggtcctgggccaggctgaatcatgctttgccaagacagccttcagactagtcagcacatttcttcccctttccagtctataaaaatcccagacccagcctcatagtgggcaacccatttgggctccactctctgctgcacagagctttctttttttgcttattaaacttttgctccaatctcacccttgtgtctgcattccttaatcttcttggaagtaagacaaataactccacatagtacctcagaaaacaaaaaactgctacactgtggtgcattggcaagcctgtaacagaagtagtaaatctaaaaagtcatatggaaatgaacgtgctatagaatatgtagagaagtttaaatgagagattgaagaaagagcaagacaagaaagagaaaaattagaagtccatctacagaacgaatgagataccagcagcagtgtgcaccaagcttctacagacaaagtgcgtcaaatgtttactctccatttttactacaaggccagtccaagagttaccttgtgttgaaaatcttaatagtgtaggtctcaacagaggacatattatgagagaaaacttaaggatccctacctcatacccagagacctcaaatagcagcatgaactactcaaccaagactcagccagattggatagaaaaaaataactacagaagtaaaaaatgctgttgctgaattggaaattagctctcatatggtttcttctgtagaatccactgaagaatgagtcacatctaaatcaatatgtcctttggaaagcataatgagaatatgttccagttttaaagaaaaatgttataatttataagattgtaaaattttattactgggctgtttacatgatactttctttcttattaaatataacctgacaatctttattaaatgaaaatatttttgtatcatcaacaacaacaaaagaactaggatgaagaatttcccacattcttaatatttatagggtttctctccagtatacattctcatgtgtgctcaaaaggctgtgtgaaggctttcccaaatgtcttacatttatagactttcaccccactctgactcctttcatatattcacactctagaggacagttggaagattttcccacttttattttttcttgagacagtgtctcattctgtcgcacaggctggaatgcagtggcgtgatctcagctcactgcaacctctgtctccaggttcaagtgattctcctgccttagcctcctgagtagctgggattagaggcatgcactaccatgcctggttcattttttggtaatttttagtagagatggggttacaccatgttgaccacgctggtctcgaatttctgacctcaaatgatctgcctgccttgcaccttggcctcccaaagtgctgggactataggcatgagccaacaagcttggccttttttaaaaaaacaaaaaacaaaaaacaaaacagatttcactgcagcacgagtcctgtctttgaaatgaattaggtcaactgaaggcttaatcacaatgtttacattcatactgtttctcaccagtgggaattctttcgtgctcaaaagaaactggaacaattaagggctttagaacaatgtttgtattcacacagcttctgtccagtatgaactcttttgtgtattcagaaggagctggaacaaccgaaggcttcagaatgttgcttatattcttagactttctctcccatatgagtcctttcatgcagtcgaaagtgactggaagaaatgaaggcttttccacattgtttgcattcataaggtttctctccagtgtgagacctttcatgaattcgaacagaacttgaaaatctgaaggctttcccacattgtttacatcgatagggtttctctcccgtgtgagttctctcatgcattcgaaatttactggaagaaatgaaggcttttccacattgtttacattgatacggtttctctccagtgtgagtcctttcatgcaatcgaatttgactggaacgaaggaaggccttaccacattgcttacactcaaaaggcttatttccagtgtgaattttttcatgttctcgaagggaacttgaaaaactgaaggttttaccgcatagtttacattcatagggtttctctccagtgtgtgttctttcatgcagtcgaaaggaactggaacgaatgaaaacttttccacactgtttacattcatagggtttctctccagtgtgtgacctttcatgaattcgaaaataacttgaacacctgaaggctttcccacactgtttacattcatagggtttctctgcattgtgagtcctttcatgtctttgaagggaacttgaaaaactgaaggttttaccacattgtttacattcatagggtttctctccagtgtgagttgtttcgtgttctcgaagggaacttgaaaaactgaaggttttatgacactgtttacactcataaggtttctctccagtatgagttctttcatgcaatcgaagagaaatggaccaactgaatgatttgccacatcgtttacattcatatggtttttctccaatatgagttctttcatgcactcgacaggaattagaagagttgaaggctttcccacattctttacatttataaggtcgagccccagtgtgtattattacatgtgctcgaaagcttgcagaataaaagaaggcttttccacattctttacattcatagggtttctctccactatgagtccttttatgccttcgaaaagaactgagaaaactgaaggctttaccacattctttacatttgtagggtttttctccagtgtgagttctttcatgagttcgaaagtatgtgggacaactgaaagccttaccacattgcttacattcatagggtttctctccagtgtgagtccttttgtgtctttgaaaagattggtaacatataaaggctttcccacactgtttacattcatagggtttctttccagtatgagcatgtttttgaaaagactggtaatatataaaggtttttccacattgcttacattcatagggtttctgtccagcatgagtcctttcatgtctttgaaatggctggtaatatataaaggctttcccacactgtttacattcatagggcttcactccagtgtgagttctttcatgtttgcgaaagcagtggtgataactgaaggttttcccaactgctttacatttacatggttgcttttcatattcctgatactcatttggtttctgtccagtgtgagatctcatgtgcctattaagggacgaatgatgaatgaagtctcttccacaaaagctgcattcatgtggttttgctccagtaaaagtttccttgttgatattaacatttggcatctggctagtggtttctccacatttgctacctcttctactttcacagagtctctcaaccatatgacatctgtaaaaaatgaatagcacattattagtggctttttaattattttgtatttattagtaggtatgagaattacattttaaccattttcagaaaaagtataggatatctgccctgtctgaattgttttaaagttaatatattcaatgctctggaagaagactcaaccatagttatgatcaaaacagtcaatttttttgttgttgttgtttaaataagagatggagtctcattctctcacccaggctggagtacagtggcatgatcacagctcactgaagccttgaattcctgggctcaaccaatcctcccatctcagcctcctgagcaggtgggactagagagtgccaccatgcctggctaattttttttttttttccaagatggagtcttgctctgttgcccaggctggagtacagtggcacgatctaggctcactgcagcttctgcctcctgggttccagcaattttcctgcctcagcctcctgggtagctgggattataggagcacaccaccacagctggctaatttttgtatttttagtagagatggggttttgccatgttggccaggctggtcttgaactcctgacctcagatgatctgcctgccttggcctcccaaagtgctaggattacaggcatgagccactgtgccaggcctttttttttttttttccccagatgaggtcttgctatattacccaggctggtcttgaattccaggcctcaagtgatcctcctacctcagcctcccaaactgctgggattacctacatgaactattgtgcctggccaaaataataatatttataaaaggggtttctaaatgctatttcgaagtgatttatttttcacatcctgaacatctatgatgtttttaagaaaacattttcagtgaaagttttctaggaataaataaatttgaagctgtgcttaattgttttgcttgctttcttttgaaattcccccacgggccactatttttctgtggatgcaactcaccttcgatttttcccctggtttctgtggtcatcttcaatgtcctggtcttcccacttttttcctaaaatgcatacccagaaagaccattaaaaattattagaaattatagaaaattgttacagtctagtttcatgattagctgtgactgtctgattcaatcactgaaagattccctttccacatttcaaatcttggaacacagctgttgagcaagaaacacttgttctgtgttctatatttaactgaggaaagaaatgttgatatccttacctagacaaaccaggtttttgaaggtctcctgcatcacatcttcatagagctttttctgtgaagaatccagcaaagcccactcctccagggtgaagttcacggccacatcctcaaaggagactgagtcctgaaacattccacatatgtttacagaggatgggtaagactggcagtactggggatctatacttgatttgtaagaagttcccatacaattctgtgttctccaaacatttggtgtatgactcagctgtcagaactacgactgtccacactgacttcctcataaaattcatgctgtcatgaacacacagaaattacttctatttttttctttttcctttttctttttcttttttttttttttttgagacagagtcttgctttattgcccaggctggagttcagtggtgcgatcttggctcactgcaacctctgcctctggagctcaaatgattctcgtgccccagcctcctaagtagctgggactacaggtgtgtaccatacctatctaattttttgtatttttagtagagacggggtttcaccatgttggccaggctggtctcgaactcctgagctcaggcaatttgcccgcctcggcctcccaaagtgctaggattacaggcgtgagccactgtgcctggtcaattacttctaaatttttactgtgatcatgtgaaaccttattgttctctaaaggtggactcaagctcacactggaaaagtaagagaaatgctatacaaatgaaacaaattttaagaccattaatcccttgtgagaaaaactcatttcctaccttattacgtaccatatcactcagcatttcattacgcatggaatcaatctggataaggttttaataaataaatacaccttcaagaactgtaggcttttcttttattcccatcaacaaacgagaggccaggaggcctgtggaaagctaaattgtcacaaggagctgctggccatgtcctgaaggactccaggccactactgcagtggagtaattaaggaatcagagagattgaggggttgaggaggaattatttaattatttaggtgcacccacccagttggattaacatccaaagaactgagccccaaacagagtcaagctaccttttaaccatttcgtggggtggggaggagatttgtgcagggggaagtgtattacagaagcgagaaacaaagacagttattcaattaaaacacgcattacattacttcttacttttcaaggaacgacaacatgttttacgacttgagattatctgtttagtgaccttgcagctgcacagctagagaaacagtcttcacaatgcctgggaaagggagagataaggctcactagctacagaaaaataggcagtcaatttttaaaggacttcagatctttctcttcctcagggggaactggtttttcttacatacaactgagtttttgcttatacatttttaaaatttcttttaattcctgttccactataagtactcaaatccagctggctgaatgaaaatatttctttgcagaagtattaatttcaacttgtttgtgtaatatttatcacaggctcagttcttcctttttctctctctcacatttcatggatctaggagattactaggaagttagagctcaggcctgaggaggaacgtatggcaacttacacctctacaaaatttgtataccaggagagggtttattacgcgtttacttgagactttgggaagactcgggtaggctggctaggggttttcactgaggttagggagtgggctagtgtgggagttcaagcatacaagcaggggctaatgtggattgaatgtctcaccagcaccaaatgagggtgacccaggctttcttcctaccacatctggatgtagggtacatagtagaaaaggaggaatgagattttattttatttattttatttcatttgttttgagaccgagtttcgctgttgcccaggttggagtgctgtagcgtgatctcggctcactgcaaccttcgcctcccaggttcaagcgattcttgtgcctcagcctcctgaatagctgggattacagatgtgcaccaccacacccgtctaatttttgtgtttttagtagagacagggttttgccatgttggccaggctgggcttgaactcctgggctcaagcgatctgcctgcctccgcctcccaaagtgctgggattataggtgtgagtccccatgcctggcaataatgagattttaaagctatcatccatcaaacatcacaaaaaaatgaagtcagagacttccaatttctggtctcacaagtaaggaacgtagaaattgtcaatcccagccgtgcaagtaaaaaataaacatcaaatcaattacccttcttggatccattaaagaattgagggtcataaggcaaagttttctctctaaaatttgagagatgaataggaaaagtaacagttttgtaatattcccagaacataatgttcttcttaagaagacctgttctcaaaaaattccatttcaacaaaagcccaacctactatgattttaccaaagcctatgtgacctgggggcagggacacagaagcatgtgtgaaggtgaaccgttttttgtcttcccaacaccaatacaaggtgtcttttccaacgccattctccaaatctctgacatcgactgtgccctaaaatttaattcaattctaagtacccagaattagtcagactccacaggttaaggactcagtcccacaagactgcccccatgtcagatgcaagccacacggtagggtgcccaggccacccatgcttctacacgccaactacaaatctggagttcccacaccaccctttatagttcagtaattcactagggcctccctcagaagtcaggagagtgatatacttagcatcaccggtttaattacaaaacatacaactcaggaacagccaagtggaagaggcccattggtcggtatgcagagcaggtgggatgtttccatgcattccctgggtgtgccatcctcacagcacctcaatatgttcaccaacatggaagttctcagaaccccaatatttatgaaggtcccaacacacagatatgattgattaaatcattacacactaatgattaattcaatctccagctcctcttttctcttgtgaggctgggggctagggctgaaagttcaagggcaggtctttctggtcaccaatcctaatcctaaagtcatctaggatctcctaagagtgctgctttgcaaacaaggaggatcctttcacccttctcacttgtgaaattcaagggatttaggagctctgtgctaggaatcacacacaaagactaagtatctttcttatcatatcacaaaacatcacagctcgggcacaggctcactaaaagactgagatcaaatcataggactataacatgtttcccttccacctacaccttaccactattgtcattagggtttctgtttaaaaacaggtgactgcaatgaaagaatattgcactgtttctttctgcatgtttcagactttatttaacaagtgtctagagaagcccaaagatgacaggagagagaaaagcaaggacatcaaaggaaattttaacctctgacatctacggctactgaaaacagtaaacagagacaaaacccagtaggataaacctaaaacctcacactcaaggcctatttacctcagtttctttttcccagtacatcttgtcgagttttcaacaaaaattatacgaaatacaaaaaggttttaagaacagaattagaagacagaggtcaagcaccagaaccagattaggtatagaagagatgttggaattgtcagatcagaaatttaaaccaaatatgattaatatactaagggttctcatggaaatgttgaacaatatgaaagaaaaaatagacaatttaagcatatatatagaaattctaacaaagaatcaaaaggtaacgaaggacataaaatacactgcaacagaaatgaagaacagccttacaggttcatcaatacagtggaaatgtctgaagagatgatgagtgatcttgaagaactgtcagtataacccgtcaaactgaaaaggagaaacaagacatcagaagatccaaaaactgtcagaaaattacaaaaagtggaacatacacataatagtactaactaaagacaagaaagaaacagaagaaataactgaagcaataatgactgataatttcccaaaattaatgttatacatgaaaggaaatatccaggaatgccaagcaacataaatacccccaaatccacacctgggtgtatcatattcaaggagaaaattaaaagacaaagaaaaactttgaaagaagttacagggggaacaaacaacatctttgttataaaaacataaaagaattaagtcagactcttttttttgagacattgtcacactctgttgcccaggctggagtgcagtgggacgatcctggcccactgcaacctccacttcctgggttcaagcaattctcctgcctcagcctccgagtagctgagattacaggtacgcaccaccatgtccagctaattttttgtattttcagtagagatggggttttgccatgttggccaggtgggtgtcaaactcctggccccaagtgatctgcccacctcgacctcccaaagggctgggattacagacgtgagccaccaggaccagcccaagactctttacagaaagtgaaagcaagaagagactggagtgaaatgtttaaaacattataagacaaaacccccaaccacatagaattctgtatagagcaagaatatccctcaaaatggaagagaaatgaaagctttatgagataagaaaagataatctgtcactagcgtacctgccttgaaagaactgttaaaaaattccctacaaaaaagaaaaacgataaagaagggtattagagaaaaaataaatacaagtaaaatacaatctcttttttgtaatctgacagatgagtttgtccaaaacactaacaggaacaatatatttggtaagtccagcttatggataaatgatacgtatggtagcaatgttacaaaggacaggaaaggaggaattgggaatactttttcatgaggtacttgcacaaccagtgaggtagtacagtgttctttacaagaggacttgggttacttgtaagcatgtactacaaactcaaaggcaatgagtaaaacttaaaaaacaacaaaaaactataattgatgtgctaagtggggagaaaaatggcatcaagtaaaatgcttaatgaaagcagataaggtagaaaaagaatagaagatgggaaaggaagaacaacaacaaatagaaaaacataaaaagaaaaagggagacattaatacaactaaatcaataacatgttaaacatcaatggtctaaatacaacaaatggtggacagatactgtcaataatggatcaaatatacggtgttgaaaagaaacacattttaaatatacagttatagatacattaaaaataaaggaatgaagaaagatatgccatgctaacactaagaaaaagaaaagtaacacagctatgttcatttcagacaaagctgacttcacatcctggaaatctcagtgacacaggggcattatgtaataacaaagtgatcaattcaccaagaagacaaggcaatccttagtgtgtatgtgcataaaaacagagtggcaaaataatgaggcaaaactgatggaacggcagggagaactgcatggagccatgaagtatagctggagacttcaatacctgtctatcagcaatagcagatccagcaggcagaaaatgaggaaggacattgttgaactgaacagtaccatcaaacaactggactgaacggaaaatcaaaacacttagaccagcaatagcaggatatacattcttctcaagttcacatggaacattcaccaaggtagcccacattctggaacataaaacatatcttttttttttttttttgagatggagtctcgctcttgttgcccaggctggagtgcaatgacacaacctcgggtcactgcaacctctgcttcctgggttcaagtaattctcctgcctcagctttccgagtaacttaaataacaggcgcctgccaccatgcctggctaatttttttgtatttttagtagagacggggtttcgccatgttggccaggctggtctcaaggtcctgacctcaagtgatctgtccgcctcggcctcccaaagtgctgggattacaggcatgagccaccatgccctgccaggaaattgggcagctcaattttctaagagctcctaaaataattggaagcccctaaaattaaaaataatcagggaactcattttacatcaaggactacacaagtgacatcagatcaatgagatacacaatggaatttccacctaccctataatcccacagcagcaagatgtatatagaaattaaccaggctactaaaaagagaattgaaaaccctagacaaagtgagcacatcccaagaagctcttaacccggcatgttttaatttaaataaaagagaaagcattcataagaacaacctcctactcttactttatttatttattgatttttttgagacagagtcttgctctgtcactcaggttggagcgcagtggcgcgatcttggctcactgcaacctccacctcccgggttcaagtgatcctcctgcctcagtctctcaagtagctaggactataggcacgcaccaccatgcccggctaatttttgtatttttagtagagacggggtttcaccatgttagtcaggctggtcttgaactcctgacctcatgatctgcccgccttggcctcccaaagtgctaggattacaggcatgagccaccacccccggcccttcctactcttactttaatcaaccaaccttaatagtcacaaaggataaggaagacaatgatacaaagattataccttacaaggggagcatttgactaaatgccaactctatctcccagcaggacatcttggcccatggatatgaaaatacttattgactacaggtaaaagaggagacttagaattatgcaaaatctccaacttttctccaaattctcactagacctagatttgttacaccttttacaacagtggcactacactgttttcttcaagtcactgattgcatcaatatttccataagaataattgaaggtatacttcaatccagttttacttgccactcacctcgtatttttaacttcaacatcacctgtagccatcactggaataactcgtttacttgcttaagaacaacaacctgggcttggtgtggtggctcatgcctgtaatcctagcactttgggaggccgaggtgggtggatcacctgaggtcaggagttcaagaccagcctgatcaacatggtgaaaccctgtctctactaaaaaatacaaaaattagccaggtatggtggcagccacctgtaatcccacctactagggaggtagaggcaggagaattgcttgaacccaggaggcagagtatgcagtgagccaacattgcgccattgcactccagcctgggtgacagagcaagactcagtctcaaaaaaaaaaaaaaaaaagaacaacctggctacaaatttgtgtagcttctcagttggtcttaccgcctttctcattcacctctgctagtcatcagagtgactttactgtcttgttattacttaaattccaaccacataaaccagggtaacacaagcatacacaccactgcagacaaatgacaaattacaccatctgcttgccaagcacagtatctgattaataatttgcagactgacagcaacagtgcactcccagcatggagacttagtttctccaagatcacctttagcctttctaagatctcctatgtctcaccttattctacatatggctagccagttttcccaacaccatttattaaacagggaatcctttccccatttcttgtttttgtcaggtttgtcaaagatcagggtcgtagatgtgtggtattatttctgagtgctccgttctgttccactggtctgtatctctgttttggtaccagtaccatgctgttttggttgctgtagccttgtagtatagtttgaagtcaggtagcgtgatgcctccagctttgttcttttggcttaggattgtctttgctatatgggctcttttttggttccatatgaactttaaagtagttttttccaattctgtgaagaaagtcattggtagcttgatggggatggcattgaatctataaattaccttcggcagtatggccattttcactatattgattcttcctatccatgagcatggaatgttcttccatttgtttgtgtccccttttatttcattgagcagtggtttgtagttctccttgaatagttctccttgaagaggtccttcacatcccttgtaagttggattcctaggtattttattctctttgtagcaattgtgaatgggagttcactcatgatttggctctcttttgcctgatattggtatataggaatgcttgtgatttttgcacattgattttgtatcctgagactttgctgaagttgcttatcagcttaaggagattttgggctgagacgatgggttttctaaacataaaatctgcaaacagggacaatttgacttcctcttttcctaattgaataccctttatttctttctcctgcctgattgccctggccagaacttccaacactatattgaataggagtggtgagagagggcatccctgtcttgtgccagttttcaaagggaatgcttccagtttatgcccattcagtatgatattggctgtgggtttgtcatagatagctcttattattttgagatacatccaatcaatacctagtttattgggagtttttagcatgaaggaagggctgttgaattttgttgaaggccttttctgcatctattgagataatcatgtggtttttgtctttggttctgtttatatgatggattacatttattgatttgtgtatgttgaaccagccttgcatcccagggatgaagccaacttgatcatggtggataagctttttgatgtgctgctggattcagtttgccagtattttatttaggatttttgattcaatattcgtcagggatattggtctaaaattctcttttttttgttgtgtttctgccaggctttggtatcaggatgatgctggcctcataaaatgagttagggaggattccctctttttctattaattggaatagtttcagaaggaatggtaccagctactctttgtacctctggtagaatctggctgtgaatccatctggtcctgggctttttttggttggtacgctactaactgttgcttcaatttcagagcctgttattggtctattcagggattcaacttcttcctggtttagtcttgggagggtgtatgtccaggaatttatccatttcttctagattttctagtttatttgcgtagaggtgtttatactattctctgatggtagtttgtatttctgtgggatcagtggtgatatcccctttatcattttttattgcatctatttgattcttctctcttttattctttattagtcttgctagcagtctatcaattttgttgatctttttgaaaaaccagctcctggattcattgattttttgaagagttttttgtgtctctatctccttcagttctgctctgatcttagttatttcttgctttctgctagcttttgaatgtgtttgctcttgcttctctagttcttttaattgtgatgttagggtgtcaattttagatctttcctgctttctcttgtgggcatttcgtgctataaatttccctctacacgctgctttaaatgtgtcccagagattctggtatgttttgtctttgttctcactggtttcaaagaacatgtttatttctgccttcatttcgttatgcacccaatagtcattcaggagcaggttgttcagtttcgatgcagttgagtggttttgagttagtttcttaatcctgagttctagtttgattgcactgtggtctgagagacagtttgttataatttctgttcttttacatttgctgaggagtgctttacttccaactatgtggtcaattttggaataagtgcgatgtgatgctgagaagaatgtacattctgttgatttggggtggagagttctgtagatgtctattaggtctgcttggtgcagagctgagttcaattcctagatatcttgttaactttctgtcttgttgatctgtctaatgttgacagtggggtgttaaagtctcccattattattgtgtgggagtctaagtctctttgtaggtctctaagggcttgctttatgaatctgggtgctcctgtattgggtgcatatatatttaggatagttagctcttcttgttgaattgatccctttaccattatgtaatggccttctttgtctcttttgatctttgttggtttaaagtctgttttatcagagactaggattgcaacccctacttttgtttgttttccatttggttggtagatcttcctttgtccctttatcttgagcctatgtgtgtctctgcacgtgagatgggtctcctgaatacagcacactgatgggtgttgactctttatccaatttgccagtctgtgtcttttaattggagcatttaccccacttacatttaaggttaatattatgtgtgaatttgatcctgtcattatgatgttagctagttattttgcttgttagttgatgcagtttcttcctagcatcaacggtctttacaatttggcatgtttttgcagtggctggtaccagttgttcccttccatgtttagtgcttccctcaggagctcttttagggcaggcctggtggtgacaaaatctctcagcatttgtttgtctgtaaaggattttatttctccttcacttatgaagcttagtttggctggatatgaaattctgggttgaaaattcttttctttaagaatgttgaatattggcccccactctcttctggcttgtagtttctgccgagagatttgctgttagtctgatgggcttccctctgtggggaacaagacctttctctctggctgcccttaacatttttcccttcatttcaactttggtgaatctgacaattatgtatcttggagttgctcttctcgaggagtatctttgtggcattctctgtatttcctgaatttgaatgttggcctgccttgctaggttggggaagttctcctggataatatcctgaagagtgttttccaacttggttccattctccccgtcactttcaggtataccaatcagatgtagatttgtattttcacatagtcccaaatttcttggaggctttgttaatttctttttactctttttttctctaaagttctcttctcacttcatttcattcatttgatcttcaatcactgataccctttctcccacttgatgaaatcagctactgaagcttgtgcatgcatcaagtagttctcgtgccacggttttcagctccatcaggtcatttaaggtcttctccacactgtttattctagttagccattcgtctaatcttttttcaaggtttttagcttctttgcgatgggtctgaacatcctcctttagctcagagaagtttgttattaccagtcatctgaagccttcttctctcaactcatcaaagtaattctctccgtccagctttgttccattgctggcaaagagctgcattcctttggaggagaagaggtgctctgatttttagaattttcagcttttctgctctggtttcttcccatctttgtggttttatctacctctggtctttgatgatggtgacgtacaaatggggttttggtgtggatgtcctttctgtttgttagttttcctcctaacagtcaggaccctcagctgcaggttggttggagtttgctggaggtccactccagaccatttgcctggatatcaccagcggaggctgcagaacagcaaatattgcagaacggcaaatgttgctgcctgatccttcctcttgaagcttcgtctcagaggggcacccggctgtatgaggtgtcagttggcccctattgggaggtgtctcccagttaggctactcaggggtcagggacccatttgaggaggcagtctgtccgttctcagatctcaaaatccatgctgggagaaccactactctcttcaaagctgtcagacagggacatttaagtctgcagaagtttctgctgccttttgttcagctatgccctgcccccagaggtggagtctacagaggcaggcaggcctccttgagctgtggtgagctccacccagttcgagcttcccagccgctttgtttacctactcaagcctcagcaatgacggacgccccttccccagccttgctgccgacttgcagtttgatctcagactgctgtgctagcagtgaaagaggctccgtgggtgtgggaccctccgagccaggcatgggatataatctcctggtgtgtcatttgctaagactgttggaaaagtgcagtattagggtggaagtgtcccgattttccagataccatctttcacggcttcccttgactaggaaagggaattccccgaccccttgcacttcccaagtgaggcaatgccccgccctgctccatgggctgcacccactgtctgccaagccccagtgagatgaacctggtacctcagttggaaatgcagaaatcacccatcttctgcattgctcatgcagggagctgtagactggagctgttcctatttggccatcttggagcctcaaggccgagtactgttatatcttagttgttacagtgttatgtttaatcagatacatattacatatccaataattaatataaaacataggattgacacaaatagactaaaatagttaatttttttctttttttgtagtgatggggtctccctatgttgctggtctcaagtcatcctcccgccttgaccttccgaagtgctgggattataggtgtgaggcaatgcacgcagcctaaaatattttagaatataaaagggatataacagatacaacaactactactactactacttctgttcctaccactcctactaaagccaccgtaaaaattcctgagcctcgaatacatagatatccaacaatgccaactcatacctaaaatcacacgattaccagaacacactccacatgtacttgatgaaaatatattcttttttgaacaactgccagaaaaatcaagggactaataatatgtagtctcagaccatttgaaatgaatgcctaaagagtttctacacacacatccaatcaatgcatctttatagacgcttggcatgtattcccaaacaccccttagaagaccacataaatgcgactcaaccaatgtatgtagctataatcaagcattcaataacatctcaaaccaatggacagcacacataataatagaaaaatgctaccagaaacagacatgccaatccaaacagatcattacccagcctggccatcatggtgaaactccgtctctactaaaaatacaaaaattagctggcatggtggctcatgcctataatcccagccactcgggaggctgaggcaggagaatcgcttgaacctgggatgtggaggttgcagtgagccaagatcgcaccattgcactccagcctgggcaacacagtgagactcttgtctcaaacaaaacaaaacaaaacaaacaaaaaaacacaacaacaaaacaaaacagatcattagataaaagcaatctgtcagaccaaacaccaatcccagtaccacagtcaaaccatatactggggccaggtgcagaggctcatgcctgtaatcccagcactttgagaggccgtggtgggtggatcacaaggtcaggagttcaagaccagcctggccaacatggtgaaatcccgactctaataaaaatacaaaaagtagccaggcatggtggcaggcacctgtaatcccagctactcaggaggctgaggcaggagaatcacttgaaactggaaggcagaggttgcagtgagccaagatcgagccactgcactccagactgtgcgaaagtgcgaaactccgtctcaaaaaaaaaaaaaaaaaaaaacatatactggaagaactaacatgacaagcttaaatatgatatatactcctatgagtcatttgttgatacttgatgtgaattctggtaccaatctgaactcgaaggaagtaaagattatgattacaaagcagatctaaaagatggtacaacaccagacacagctatcacaccaatcattcatattacatatacccaactttcagacctccacgggaaaaaataccaatgccactgggatacccattggactgtgatatataatagaagaggataagacatactataatgattctctaactttccacttttgagaaattttgccttccaaccttgttataattatgccaaaagtcaaacttatttgacagaaccacaattctttgacagaactaaaaaaatcctcatagtagaattagattggaaacaaagattacacccagtaatcttttccccccgacaagacggagtcttgctctgttgcccaggctggagtacagtggcgtgatctcagctcgccgcaacctccgcctcccaggttcaagcgattctcctgcctcagcctcccaagtagctgggattaaaggcacccaccaccacacccagctaatttttgtattttttagtagagacagtgttttaccatgttggccaggctggtctggaactcctaacctcgtgatccacccaccttggcctcccaaagtgctgggattacaggtgtgagccattgtgcctggcccacccaataatcttaactgatcctcatcactttacacacacaacttttttttttttttttgaggcagtcttcctctgtcatccaggctggagtgcaatggcgcaatctcagctcgctgcaacctcagcctcctgggttcaagcaattctcctgcctcagcctcccgagtagctggaattataggcgccagcccccacatccagctaattttttgtattttcaggagagacaaagtttcaccacgttggccaggctggtctcgaactcctgactcaggtgattcactcatctcggtttctcaaagtgctgggattacaggcatgagccaccacacctgggcctacacacacgacttctgaaacacatgctaaaacaacagaagattatgtagacagagttgtcctaaatatacttgttttcaagggtaccaattaaacaccacaactgagaaacttataaaaaaaaatgtacagaatcacccaatgagacacatattttaagggatgaccaacattaatatgcttccaccttaacatatattagagctgtatttcatcatcctacaggtgaaaaaccttaccctcacccatttttcaatataatttactaaaatggctacatatacctagaccgataagctttacaaatcaaactgaatgaacagacacagcaccattcagaatgtgacataattcaacacatactaaattcacattcgtggcaagcttggctacaatatatgcaaactacctttatttatttagttagttttttttgagacagagtctcaaggctggagtgcagtggcattagctcactgcaacctctgcctcctgggttcaagcaattctaattctcctgcctcaacctcctgagtagctgagattacaggtgtgtgccaccaggctcggctaatttttttttgtatttttagtagagatggatttcactatgttggtcagggtggtcttgaactccttacctcaggtgatccgcccgcctcggcctcccaaagtgctgggattacaggcgtgacccaccgtgcccagcccgcagttttatttaagggcagggtttgattttaaacacaaacttaactcccacatgtcaactaccactttcatactctcctctatctcacagacaatgaaatacaatcaatgatgactcatataaatgacctcacagaatatcaaaaggtgtttaattacagtatcaattacaaggtaggcatcttaaaaaccaatctatttacattaataaacttgacggtgaaagactgactgcaaacccaatgtactaagcgaagtacttatactaactcagacttggaataacataagaaatccaatacaggccgggcgcagtggctcatgcctgtaatcccagcactttgggaagctgaggcgggcggatcacctgaggttgggagttcgagaccagcttgattaacatggagaaaccctgtctctactaaaaatacaaaattagctgggcgtggtggcgcatgcctgtaatcccagctactagggaggctgaggaaggagaatcgcttgaacctggaaggcggaggttgcggtgagccgagatcaccccattgcactccagcctgggcaacaagagtgaaactccatctcaaaagaagaaagaaaatataaaaaaagaaacccaatacaatcaggaaaattatttacaaaacactggcataaagcagctgtagttcaactggatacatccaaaccatcaggatgtgaagattcaaggtcacgtatattaagcctacttgaattaagatgaggagactcacaactagcttttgacccaagtacacagacagataaaagatataatctacaaataaccaccttagaaaaaccattatttattgattattttatacaaaaataattagtattccaattctgaaaaactatatactacacctttcaggatagggtacccaaactagatatggtacccaaactgacatatcagcatcaaaagaatacccacaatcagccaggcgcggtggctcatgcctgtaatcccagcactttgggaggttgaggcaggcagaccacctgaggtcaggagttcaagaccagcctggccaacatggtgaaaccccatctctgctaaaaaataaaagaattagccgggtgtggtggtgggtgcctgtaatcccagctatgcaggaggctgaagcaggagaactgcttgaaccagggaggcagaggttgcagtgagctgtgatcatgccgttgcactccagcctgggcgacagagtgagattccatctcaaaaaaaagaaaaaaaacaacaacaaaactacccacaatgactctagacttaggaaccttccactggttaattgctcagagaaaaacacactgacctattacaaccacacgaggaaagaaaaaatcacaacatacacttacaatcagaatgtatcaaagtggtgtgtgtcataaacatcactctcacaaacacctcaaagcttaccacttagccgggcgcggtggctcacgcctgtaatcccagcactttgggaggccaaggcgggcagatcacaaggtcaggagatcgagaccatcctggctaacacggtgaaaccccgtctctactaaaaatacaaaaaaattagctgggcgtggtggcgggcgcctgtagtcccagctactgggaaggctgaggcagaatggcttgaacctgggaggcggagcttgcagtgagctggagatcgcgccactgcactccatcccgggcgacagagcgagactccgtcacacacaaaaaaaaatgcttaccacttatatacggaacaaatgacatacagagattttgcatcatcatggcactccaacataggcgaaatctcttgggtagaaaccacacagataaacacacacaaacaagaaaatttaaaagaacctgaacaagctcacaattaattccatccagaaaccaaagaaactaaaaatcgcacacattcacgcaagggaacaaaattacccagagcgaagggaaactggaattaagggtggctagaattaatatttgatcaaggagtccaaagggaagaaacacaaactttctgatcagttaagataaggagtccccttccccgcagttcgaaaagaaagcccacattcagaaggtcaaaaacacccccagacttgagtgctgggagcactagagggggtcagtccctggtgatgagggcaggggcgtttgaacagccacaggaacctgaccccggcagcaaggacctagccaggcttcggttctcacaagtgaggaaacgcacccgtggattcatcgtaaggtttccaaccaagtggtttcttaaacgcacaaaccccacagaccgagatgggatctccccaggaccctcccgctgtcaccgaacaatccggggagacgcggggctgcgggcgcagagctgcccatagagggctccaggaccgggggccgaggtcgccccgcggggacgggacaggacgctggggctcccggctgcgggtccagctcccacagagaggaccgagggccgaactgcgcccgcggtggcccccgggtctgcaaaccccggagttgactgcaaggaggtccccggcctcggccacagacggttccaaccagaaacctcccctcggacactggccccgcacactcaccatttcccagcgtccgggaagtcacggtgtcctccctacggatctgtcagtacctgcaggtcacggcgcgacaaaggatgcgctagagccaccttcggccttcaggagcaggtgaaacgcaatcttcccatgggccaggaatggcgacgtccgcactgcgcaggcccagcgtggcgccgctcacatcttttcagctgaggtcctgattggacagatccaatggccccgcctctttatcactgagtgacagcggagcaggaaggggcgtggttgagctggcctggcttcagtccggcttgtccccgccaggacgtttgcgtttaaaccgaatgtgttctttgcctcccatccattttaagtgttctcttcagtactgttaaatacattcacattgtgaagccaatttccagaattgttttcatcttgcaacactgaaatctgtctcgttgcacaactccccgtgcacctccttccctcagggtcttttgcaacctccattccattgtctgagttcgtgaatttgactgtgggaatctcatgtaaatggcgtcataaagtatttgtcctttcctgacgtgcttatttcacttagcataatgtcctcgagcttcaccttgtagtatgtgttaggatttatttcttctttttttttttttttttgagacggagtctcgctctgtcgcccaggctggagtgcagtggcgcatctcggctcactgcaagctccgcctcccgggttcacgccattctcctgcctcagcctcacgagtagctgggaatacaggcgcccgccaccacgcccggctaattttttgtatttttttagtagagacggggtttcactgtgttagtcaggatggtctcgatctcctgacctcgtgatctgccggcctcggcctcccaaagcgttgggattacaggcgtgagccaccacgcccggcctcttcttcttttttttttttttaagagacagggttttgctctgtagcccaggctgaagtgcagtggtgtgatcattgctcactgcaggcttcaactcctggattcaagcaagcctccaacctgagcctcctaagtatctgggactacacgcacgcactaccaggcctggctaattgttttaattttaattttaatttttggtagagatgtgtgtctccttctgttgcccaggctggtctcgaactcctaggttcaagcaatcctcctgcctcgacctctcaaagtgctgggattacaggtgtgagccactgccaccggccaatttacttctttttttttcctttggagatggagtctcgctctcgttgcccaggctggagtgcagtggcgctcagccaccgcaacctctgcctcccaggttcaagtgattctcctgactcagcttcctgagtagccaggattacaggcgcccaccactactcccggctgatttttgtattgtagtagagatagagtttcaccatgttggccaggctggtctcgaacgcctgacctcaggtgatctgccctctttggcctcccaaagtgctgggggtgtgagccacctcgcctgtccccaatttacttctttttaatgctttatttaaacattttttaaagagttcctaaattagtcagttcctaaatctacatacaatagaatagaattgtattctattgtatgtagatatcaaatttctggatttttctggatctatttatctttctttctttttttttttttgagacagtcttgctctgttgctcagactggagtgcaatggcgtgatctcggctcactgcactccacctcctgggctcaagcaatccttgtgcctcagcctcctgagtagctggggttacaggcatgtgccactatgcccagctaatttttgtaattttagcagagatggggtttcgccatgttgcccaggctggtctcaaactcctggggtcaagagatctgcccaccttggcctcccaaagtgctgggattaccgcatgagccacctcgcccggccttatttatcctttcctggacacctaggttgcttctgcctttggctatggtaaataatatgtctatgaacatgggtgaacaaatatgtgggttgctgctttcagttttttagggtatgctcagaagcagacttcctggatcatatgattactttgtatttattatttatttaaggaatggccatactctttttcctagcagccatagcattttccattcccaacaacagtgcacaaggatcccaaaaggtgttctcacttttttggtggtgtcctttgaaatacaaaagttatcaattttgctgggcatggtggttcatgcttgtaatcccagtactttgggaggctgaggcacgaggatcgcttgaggccagaagtttgagaccagcccaggccaacattccaagaccctgtctctacaaaaaataaaacaattagttgagtgtggtggtgcacacctgtagtcccagctactcaggaggcagaggcaggagaatcactgggggctgggaggttgaggctgcagtgagccatgattgtgccactgcactccagcctgcgtgacagagcaagaccctgtctcacacacacacacaaaagattcattctatactaggcattgatatgttatttattgttttattgttttattttttgagaagggtcacactctgagatcacgcctgagctgaaacttagagtgaggttagccaactcttagagtgaggtaaggctagctctccaactttagcccttttccctgtttgcctttctctctgccattactgaactgctggtcatgccctcctcaccaatttctctctctcccttttttttttttttcttttttgacagagtctcgctctgttgcccaggctggagtgcagtggtgcgatcttggctcactgcaacctccacctcccgggtttaagcaattctcctgcctcagcttcccgagtagctgggatcacaggcacgcgccaccacgcctagcttatttttgtatttttagtagagacggggtttccctctgttggccaggctggtctcgaactcctgacctcaagtgatcctcccgccaaggcctcccaaagtgctgggattacaggcacgagccatcgcgcctggctgatttaggaactctttaaaaaatgtttaaataaaacatttttgtattgtcttttttttttttttcttgaggcagagtcttgctctgttgcccaggctggagagcagtggtgcgatctcggctcactgcaacctctgcctcccaggttcaagcgattctcctgcctcagcctcccgagtagctgggattacaggcatgcaccaccacgcctgtaatttttgtatttttagtagagatggagtttcaccatgttgcctaggctggtcttgaactcctggcctcaagtgatccacgcgcctcagcctcccaaagtgctgggatacagtacaggtgtgagccaccatactcagccaatttaggaactctttctaaatgtggtaatacagatacctcaaagctaaaataatattcccaagcctttaactttttacgtgatggaatattgtgtctcagcagaatattgagttgcctttctttttttttgagacggaatctcactctgttgcccaggctggagtgtagtgctgcaatctcagctcactgcaacctccacctccccggttcaagtgattctcctgcctcagcctccctaatagctgggattacagccacgcaccaccatgcccagctaatttttgtatttttagtagagacgaggtttcaccatgtgggccaggctggtctcgaacccctgacctcagatgatccgcccgcttcggcctcccaaagtgttgggattataggtgtgagccaccgcgcccggctgagttgcctttcttctcaactaaaaataggcctgtttgtatcaccttggccatgcctgtctactctgtattttgattcaaatcaaactatcataatagttatgctaataacacataaggtaaagacagggtttaataaatttgtttattatatcagttatgtgatctatataatttctcttgtctctacttcattttatattctcagccaaatgcccagtagtggttttatctttttgaagtgtgagattatctccccacttcttccaattcttctttcttctttcactctttttttattttattgttttttttttttttttagaaagggtctccctctgtcacccgggctggagtgcagcattgtgatcgttgctcatcgcaacctcgcctcaagcggtcctcctccctcagcctcctgagtagctggggccacaggccgatgctcccacgcctggctaattttttcatttttgtagagatggggtcttgctatgttggccaggctagtctcaaactcctggcctcaagtgatccccccgcctccgcctcccaaagttctgggattataggcatgagccactttacctggccccaaatgatggctttcttattctttcatttcttcaacgtggataaagaactaaaacaaaacaaaaccaacaaagaggggagaagggaaggaaagcatgttaatttgctgctcaaatgccccccgatgtggtggtcatgtcaagctgacttaatgtttttttgatttgtcactggtttcctttgagcacttccctactttctggcctaacataagatgatgaacatgagatgttccaagcttatcttgtattttctctgctccagccctggaactagccatttttcttagaagcaggggtggagagcaccctccccccacgcaccttcactaggccccagtgggaagaactgctgcccatctgctcaggtgtggtgaaactagcaaagagtctcctggctgcctgtggagagtctctgtatgtggtcctcagcccagcctgggggctcctgggctggctaccatgctgcctctactgtgtctctagatccaggctctgctggaagagccctggaaggcccagcagaagggggagcctgtcctgacaaacatccctctgttcctctggctccaaggctcaggaatagggccagatgacatgtccaggtggtgccaggacccctcactgtccccttggagatgggcccagagagccttgtgggggcacctggagcctgaggctgaccgtccctccctgtgtcctggatgaggagccctgtcctgagaagacccccaggggctggcctgcgggcgcagccacaggaaggggagggtctgtgggctgagtttgggcggggggcattagtagaggactttgggcactacgtgtcagtggtctgatcagcgggggccttgtcattaggaacctggtcaggggatgggtgtggtggctcatgcctgtaatcccagcactttgggaggcctaagcgggaggatcgcttgagctcaggagttctataccaccctgggcaacacagtgaaaccccctctctactaaaaatacaaaaagtagctgggggtggtggtgtgcacctatagtcccagctactcaggaggtggaggtgggagaattgcttgagcccaggagatcaactctgcagtgagccaagattgtgccactgcactccagcctgggcgacagagtgagccctgcctcaaaaaaaaaaaaaaaaaaaaaagtaaagtccaaaaacaaacaaacaaaaaaataggaacctggtctgggaggattggttaacagggacttggtcatccaaggcctggtcagtgggggccttgtcattggggaactggtcagtggtacctggtcagcagggactgggtcagtgggaactggtcagctggctgctgggtgacctcaggtaaacagtttgtccctgatgcctccttgcctccatccctgagtcacagacccccagaggtctactgggaggaggaggtgagaaggtgagttgaatccaggcctgccccttagacctagcactttacatactacctgagtcccccaagggaggggccagctctctgccctctgccttcagccctctgccctcagccctctgccctcagctctctgccctcagctctctgccctctgccttcagccctctgcccctactctgtctgcatccccaggacagacccatatggagagggcagagactgaggagcacccatggatgctctgatgctgaccatgggccctagggtgacagtgatgaggacgtgggtgtgcacgtgagtgtgacacacacactcacacagatgttcacccacacgggatgctcacatgcacagacacatcacacatactcaggttgacagtgcagggggtggaggacgctgactctcggccctttgtgggtgctgtgaccccaaaatatcaccatgccaaatgcccacctgcctgcctctgtgtcacggagcagtcagaggcacgccagtgtctgtgagtgctgggcacgtagggctcttttctaggcaagaggcacatctccgaacagctgccagatcagactcaagagcatgacctgctctcttccttccctgctgacttggggacagtcactgcctggtgggtgatgctggtctctgggcagctgccaaagagggtcattcctgggcactcaccagtgcttgttctgtgctgaccatgtacacggttgtcttgttcatcctcgtggtgactccagggggtgggtgctgtccccaagtatacccattcgacaggtgagacatctgaggttataagggcggtcactggtccaggaacccagacgtgaccctgggccatgctctcacccctgccctgtgctgtgtgggactcactcccttacgcggtgccccttatgccctcgatcccaaatctttccaaaatttttgacagcaataggacagagcctggccttggaagagcccctgtgggtggggtggagggtggtcttccatccaggtctgtgtcctaaggtgggtccctgcaagagaagatctcatcaacccagactttgggtgcagtcagtgggggtcgctgtgggacccactggacatatgggatctcttgtctgggagtggggtggggagccctctgtccttgggcagttgtggaaaatgatggcgccccggagggttggttggagggtgatgatcgttcctcctcttcaccgggaactggggctcttccgcacaaggccctttctctgttcctttacgggcctcgccctttctttgttccgaatgttcatgggaagggaccctctggagttctccaggaccaagtcatcagagttctcattctttctcagtgaccccggaacacgagggtccttcctgtattgacagctcagaacttgggatccactgtcccttcacctgagacatcttcatgagcagagaggctgcattgaccccaaaccaagcaccctcccgtttggctgatgttattcttgaagcggcttcactggccagagggagtggagatgggggtgaaacggagcagtcacgaggtgtcttgttccctgtaagaaactgggcatcttcatggtccctgcgtgatcccaggaggctgagcatatggagctctctgatccctgaccccagtctacctgcaggtgtctgaaatagcgcaccacaggcccctcaccctcagcagatggacaccgttcctcccttatgtgcctgatttagggcatttggggacaatgggcctctgtgtccaggtccccctgttctcaaatcctcaggaagaagcccacctctggctggggcagggactccagagaccccagcaggcatggggaccctagatctggccccttttcacccggagcggtggtggcatggggttcacctggccggcggcgtctcagagttgggtggaagcggtttgggtgttctctgtagcacccaggtgcagtgtggcctttggacaatgttgtctcgcaggatggacatggaaaaggattacagctgccctgcccgcgcaggagcgggacatcattgacaagtgtgagcaggtccgggtcgggctgttccctcgagggaggcgaggccacccatctccagctgtatcctggtcggagtgtcctgggctccctccggatgcagggccaggaccagctgctgggaacttcatgcccccacacccctcacctcggccccctcaccctgaatcccctctgggtcacagggatgctgagcagaggcacctgcagacgtggggcctgaggatattgacagctacaaagtcaccgatcacctcgggattcggcagtgagtcctctgttcccaccctcaccacccagggatgggttttttttttttttagaaaggcctcactgaggcaggacacatctccccagctcgtgccaatctcctttctagcgtagaaactcctcccctgtcaaagtcctttaaatgctcaaactgcctgctttggattcttattgaacttatactccaccctgtggtacaggggctaatatgctgggcctttaccacttcagcccaggttcgattcctggtcagggaaccagtgccacttgtcttaatttgcatgactctttaccctttgagaggtgaacccagaaaatccgtgacaggtctcagttaatttagaaagtttattttgccaaggttgaggatgcacccgtgatggtctcaggaagtcctgacgacatgtgcccaaggtggttgggacacagcttgcttttttttttttttttttgagacggcgtctcacactatcacccgggctggagtgcagtggcgcgatctcagttcactgcaacctctgcctcccagactcaagcaattctcatgcctcagcctcctgaaaggctgggattacaggcacccaccaccatgcccagataatttttttttttttttgagacggcatctcgctctgtcgcccaggctggagtgcagtggtgcgatctcggctcactgcaagctccacctcccgggttcacaccattgtcctgcctcagcctcccaggtagctgggactacaggcgcccgccaccacgcctggctaattttttgtactttttagtagagatggagtttctatgtgttagccaggatggtctcgatctcctgacctcgtgatccaccagcctcggcctcccacagtgctgggattacaggcgtgagccactgcgcctggcccacagcttgcttttatacattttaaggagacatgagacatcaatcaatatatgtaagaagtacattagttctatccagaaaggtggggacagctcaaagcaagcccccaccccccgggggaggtagatggaggctgagagatcagaccttgcggggcacttggggacatcaggtgggacaggccccaggtgcaccctcagtgcactgggcaggtctcaggatcctggcctggtaatgtggtcactccctcgaggactgcttttggggcccagtcacccaccctgggccatacacgtcctttctcaggactggactttctcagctcctgcagagggcactgcctctagcccaggaggggcagccctgttgtgtagcccaagcccatgctctacagggccctagtggtccctgccccacccacacacccctcttctcccaggtcctgtcccttcacaggcgtcagcccacagggagaccctcttcctaccttccctgtgtgtctcctgggctaagaccaggggtggggtggggagagacacggctggtccttccctaggactgctagggaaggaggaggacagctcccggcccagcacaggccctcagctctgtctgggttgccttacagtgagacaaagctgccatcgatcagtgccctggaggcaaaggtaagacctgctgcctgagaggctggtccagggacaggaggacttggcaggtggtcagcagcccgtgggcaccagcgatggtgagtgggagagacaggctgtccctgggaggggtggcagttcctgctggacctgaccccaagactctgtccccattggttgtttgaccaaactccaaactgagaaccgcagtcacggctcgggggttgctgtctgcttgcaccaggaccccacctggaggctagtacttgaccaaagtccagtgtctgtggcctgaggatggcatgtcccaggtcgtgaggccaggtcacagacgcctgttcagtcagagggtctcagtccccggggcctgccctttcctggttctttttgtggttcagtcccgtcagggcctcggagcccaggatacagcatccaaaggctgcttcaggaagccttggtagctccgctaacttctggtcatagttgacagcaaagacgtcaggagatgagaggcacagagaaatggctccagatgcttcaagacgggcagggatataggagtggcaaggaggtgacatggggagggagggcccccgtgaccgctctctacagagtcagggggatgggctcccatggctgggtcctggcactgcctgcctctcagagggtgggtgacacactgtcctcaccctggacagcaggtctggtcaccagctttcctgtttgtccctgcaaacctcaacttgctggagacagtgtgatgccagggcatgagccaggactatctcagggatagggacaccccctggcaaaccgaaggaaggaataggtcaagatgagaattcataactctgaatcgtgggagggaggcctggtcctaggtaaactgcacatcccctgaaaaaccaacaagtcagagactggagacttccagaatcctcaggctccgatcctccctggggctgccccagaccctgtttcttcagagtgttctgtcccaagttgatagacagcgtgtataaaggcattctccatagatgtggggccaagtgtggtcacacttcctggatgtcgagaaggtgaaggccgagaactggtggaaatacgaggtatgacccttccgaagtcagccagaggaggacaaacaggccaggctgtgttgagagcccaagcctccagctggagggaacgcagagcctgggttgaaggtggagggggcatggtcaggcggacatcctgggcagagacggtgatgccagcaccaaaggtgagctgagctccaggactagttggattgtaaggaaccaagccagaggaggagctttctgcagaaggaaaccaaccttccttccttccttccttcctcctgtcctttcctttcctttttcctttcctttttcctttcctttcctttcctttttcctttcctttcctttcctttcctttcctttcctttcctttcctttcctttcctttcctttcctttcctttcctttcctttcctttcctttcctttccttctttccttccttccttccgggctgcctgtggacgactgccgtgtggggcagccagtcttctctctgttcagaggctgcttcctcttcctggccctgccctggaggtcatgaagatgaagggaaagaggtcccccctggaacttccaccagatcaacctggatgtcagccatacactaagaaaccacatgatgttttggccacaatgcagtgtcaattaaggcttgcagggctggagagccctggggagatggcgtgaaccagagggatgggagcttcaccagagcagaggcaggggtcacccaggaggggtgacagagctaccaaaagctttccaggcccagggagcagctagcacaatagactgagtgccttcctggttgcaagccctgggcctggctgggatatgtggggccggagcccaggtggctcccgaggagacagagagcaatgaacaaaatcatgagaaatggtggaaagttcagtaacctacgggagggcggcaggatgaggggctcgggagccttcccaagccacactgacgacaccaaatgccgagacgatgtgcggtcccggggacctttgtccctgccaggtgggaatgcgacagggcacagcccctttgggaacccgttgggcggctctgcacgaaactcggtggactcgtgccacatgtcccagaagattctcagagactgatcccactgatttgaaaactgatggccatgtaaaacctgcatgccacgtccacagcttgattcaccgtcactcacagttgaaggccaccaagacaatcttcaacccgggaatagtaaaatccactttcaccaaaacatttcataaaactcagtggccctgaagagctcactgcttattctgcgcatcatctggacctggaattggattccttgttggaacacgatagagagaacaaaacagcatccgtgtgaacccaaaccctcttttctctctttcctaggctgcagcatgtctttcttgtcctggtggcatattgcacctaatcccatgagtattccaaggcaacaatattcgcgggtcacattcccatattcataggcacgggtgtcttgggtagggggtgtcattgcttctttaaaattcagtatctgacacctaccaagacgcagccggtaggactcaagctcgctgttggcttgaacattcaagcgaggcagggagggagggtctcagaggggtcatgctgagatggagagggctcaggcacagactcctggtctgacctgagcctgacccccaatctcagaacaagaaatgacaccctcctcctgggcttgccccaaggtccaggagctggtcagtgtcccaaagtggtcctcccaggaggcatttttgacaagttgccaaagtacccgatggacgtcgctcttgtcacgaaatgagtgtggatcccgcggaagctgttccttcattggaaaactggcagggatccaatgtcccctccgcccgaaccccactggagcgcagcagacagggagggggttcctgaagtgcctgctcccactgtgcccccagtttccagatcactcctggagggacagccactgagctggctccatgggctgcacacacagggtctggacccagcctccctctcatacctggcaggcagcccctgggtcttcccaggaccctgtatgcggtgggcccccagcccgccctgttggccagcctagctcacagatgctgtcccaagcctggcacggtggcctccctggcctggcatctgagggggagggacatccacggtcctctcctatgtcctctcgggccatgtgggcttggacactcgctacaggaatctctctggactccttgtcaactgagacgtgcgtgacttgctcagtcctgacacccagtgtcaggagaggggtgaacaggctgcaccccaaatcccacagggcctgtggcaggcctcctcaatgacatcagtcctctcaggtgacctcagccctcccaggtgacatccttccatggtgactctgactcttgcaggagctgggctactgcagggccatgagctgcattgctgccactctcctctatctgcccagaaaagataccttctgagtggtggcccagctgctggctggtgagaggcactccttgcagggtaggtggacagctgcccatggggactcacacagccaggcctggggatggtcaccctggctaggtgatctcagcttccaggcaaggagccttccttgtgtccccagctcgtttggagcctctaggatgttgcctgctgtgggtcatgcaggagcctgggactggatagggacccccacaccctgagttagatgcctctcatccccatcagcagagggcatcacagcctccctgtggctaccttctgtatcccggaggcttggtcctccaaccccgactttgcgcaggcaacgctcacctccctgagggtcctcctgcctcctggtggctgactgtgctcctagccgtcctcgtcaccctcagacaggcagatgaaacccagacagtaatgcttcctcatcgcatgtcccctagcctgaccctatgaatgtccagaagacagtaatgcacccccagcacccaccccgctcaccctgctggcccctgcctgccacgttcctccctcttggcctccacggcaggcctctcctcctaatacctcagctcagggcccccactgggcagctcctcccgccaggatcccggggacattcctgcccctcctcccctgggccaaggctgcatgctggaggggccagatgggagggtgggagacctgggggtctgaggacccctgccagtgccagctcttccagctgacggctccacgtcttgggagcaggctttgattttgtgataggttgtgggctctcaggattctgcagttcaaattgtgccaggctccagagactctaagcccacccgggacacgtgttatggacatcatccccgaagcttatgaggacttggtgaggagacggtccccttggctcttccccagaggcttggggatcaggggtagagggaggttctggctcctcctcatagggggtgagaggttgagtcccagcaggggccagacctgggatgtggggttctccatgggattgtagttgggtttcctttttctgctctggagcaggcagaggctctgggacggggactgggctctggctgagctgggctaagggaagtgtgtccaccgaaggtccatgcggggggcaggtgtggcggggtgccctggggaccgcccagtgttctgtccctcagggaagggctgcagaggggcctgaaatagggatgttttgggggcagcccaaggggccctgagcacctctgctcctcccatcaggacaaggatgagctgcatgcccagaattccacgtttacactggctcctctggtgctttaaatgggggtaatgaggcactggaagctcccagtccagggaccctcctgccccgcactgcttggctcccccagcccaggggtccggcttccccaggaggacctggctcacccccacccagcaggaggcacaggcgggtccccacagggcacacaagccaggcaacacctgagagggggcatcccacagcagaggccagggcagaacgggccaggtctccacttggaagagcccggggaagtccaaggccctggggagcccctccctccaggagctacatccctgctgagatgagtcccctccatgaggagctgcaagacctcttctgacccagcctcatggtggcagctcatcccatggggacgggtccctggcactccaggggactgaaaccacagtgggccctgcttgggccaccagctcccagcctggaagggccaggtcctctcacacctgctgtccccacagatccccttcgggttcagcctgaagatgaagcatgcaataatggcaatggcgcccacggccttcgaggttcacagaagcaagtccccctgtgtctgaggtttcctggggaactcatgggacacagcctggctggcctgaggcctctgtccccatgaccttctgctctcatcagaagggatggccagggatggccaggcctggcctgtagggctgggcagggcatagtgggttctcccagaccctgagcccacccttgaaatgagtgatccatgtgaaaggtgggagtgtggtgggaacctccctgcccgggcctcccccggccatggcctcctgtgcacagctggaccccagggttggccacagaaggacccagtgctgctcagtgggaggtggcagtgttggaaacggggtgtgggcaccaaccccttccaggaacccctcccggcctgatgcccttcctgtcccttgagcgaccatgaacctgtcccagtccaccctgtgggagggagttctttcaggaccggtgctcccaggcctgggccctggaggatgccacagtgctcaggcactttgaggcctttgtgggggaactgatgagccagtgctgggatctgccaccccctcgtgggctccagcaccaggtcccctctcctaagtcatcctctggagcattcgatagtggagagggccccggccccaccagccctactacctggcccttcctcctgcacctctttttctgtcttttcctcctctacactaagcagcttctgggcaggtgctgagcgcatatgtactggacatgctgctcagacaggcagggactggagaaagaaccctcaacgccccctatgctttttacatcctctctcctctgtgcgagctccctaaccaccatcccaacatcgacagatgctgagaggagcaggggccgctcactccagaatccccctccaaggacgtcagggcaataagccttgagccaggggaaaaagagaatcagtgtcactgacccagaggacttggggagaggacacggataggagccctggccagagccagatccaagagttcagccaggtgcaggtgtgggaatggtcccgtccaggcatggagtggacggtcctggagggcaaagggggccccgtgcctgggaccatctcacccactgtggagatagtgtcttgtgtgaggtggcaagggggctaggtgacagccaaggcctctcccacctggttctgaattagggctgctacccaggccacacagccctgggatgaggaggtgaaggaggaagtctggagccagcctgaatcctaagccacagccccaggagtgacgtgaggtgccccaacagctccccgtgccctgagggatccacacacctcttgctctgtgatcagcagcctgcaggggtgtcctcagagtcagactcaagaagccacacagggatgctgaggacaccagagacccaggtctgtggggcccagccttgtgaggacttaatggacttggaggagaagctgaccgctcgcatctgctattttttcagccaaacccaatcgagggtccttggcacccaggcctctgtgagcataccctggcattgagcccctctgcaagggagatgggctggcccgcccctgcctaccagcttagctccaggggtccatgcagccagccccctaccccggaatgcaaccctggtcctctcccaccctgacctggctggcagtctccaagactgaggcccaggggcacgaaggagcttccagaaagctcagggcagcaggttgctctctggggatcctgagggttcagaatggacccatgcattttctgaactccctcccgaagctgcccagagacttggctgtcagaggcccgtggttcccattgtgcaattttgaacagggatgctgtgctccgtcccttccacatccaccctacacagccccaggaccatcagtggggcccagccctgcaaccccatcttggccacaacaccaggccctgctgggccccgtgagaactgagaggcaggtccagagataagtcccttgcatgggggcacttgcatcggacccctcttggtgggcaatgactagcatggcatggaaggagccagggcagctcccagccagttgctctgcagccccagatggctcctgggccttatgaagtccctctcaacagggaagctggtccctttcaggctgccagagggaggggtgaacgtggtgtcctcccagccctggccagccaggagcatgccctgtggcctctgatttgacttgttggacagagtcccctcccagggcacaagtcctaggtccagaggggcccggcctcaaccccagccctgcttggtaggggagggcaccggggtgccatgggcctttagctgcagcaccgatggccacgcaggggacatggcacacctcacccggttgttgtaccatttcaggtcagagaaccccggcaagaacttgctgcaggaacacgaggtgctgagcctgtgcgggagcaggacatcaagggctgctcaagagcgtccatggctacagtgactgtggcctcttcccagcctcatctgtgccgtgcaggtgatctatgactccaagctgggactggcaggtgatggtggccccagcatctcagccacgctgccaacatgctgtcaggaggcttcgaggccatgcccggtatgctgcccacctccttgagaccccttcctgacactttccagccggtgctacagccgcagcacgtgccaccactgaatacctttcagcagccggtgcaggcttcagacggcaggcgtgcccgacagccgtggcctcagcagctctttcgtggcaaccaggacagtcagggcagtgatgaagtgatgatgcctaggacgacaagtgggatggcagctccgtgatggtggatgagcctagtggcggttcacacctggtcctcagtggctccctgagcccccgtggtggcaacagcttggccaccatgaggcgcagtctcaaccgcttccccacctgtcaagtcaggcagggaggccttgtgcttggcgaggcgttgggctctgtgaaggacggggacaagctgtgcgtggctctgtggctctatggcctcaagtggcaggagaacccctactccttccagtgcactaccagcgacaccgctcagtagaacaagttcaagggcatgaatagcgtcctctcctgcaagctggtgaccacgcacaggcaggtcccagtgcacggcgcaacaagcacttggactggctggatgcgtgtctggtgacattcctggctatgtctgtgccccacctacctgagaagtgggccacgagctgcttccaggaggacttcatctccaagcacaggtagagcacgatctgcgggatgagctacacggccggccgcccagtgctggcgcagtgccacgtcctccagcacttcctgatgtgcctcagcagcaccgagagaaggcctggaaacaaggcaagaggaaggccttctgtatggcacagcacctcttgaggaaagaaaataagaaaactgcctccgatccaagcagagcaggtcagcgagaaggtgggcatcacttgggggagtggatgtgggtatcgaagacgaacactggatacgtggcctggtcatgggaggtgggtggtgcgagaaaggtgacatggtgggtgccagctcgttcctgaccctgagcactgcaccaccactgccctcgacctgcaggaggtggagagcatgattgacagcttcatatgctttctcaagaaggtggatgacggcgctgctgctcagccacagggcatggagttcacggcaagcaggtgaggggctttgagaaggagcatcggcagggggccagccctcccgcggcctcagccaggctttggagtgggcccagcaggccttctgggtgggcctgaaccagcccatcaaccttcaccggaggtgcctacaataccatcgtcaagctcttcccagattggcccagacaggacctggattctgtctcggacctgttactgctgtccaagcagcaacgcatcaaattcccagacatcctccacgttcacagaggagctcttaccaaagtcacggggagcaggagactcgtgggaggaggaatgatggaggtgcgggggctgatggcgttcaggagcgtgggacacgagttctttggccactttggctgaaattcaccatctccatccaattcgagggagaggtttgagatcatagatgcagcactttttaccagagcaatacatatttttccaaaaatcgatgtagaatttgaaagcagctctttataaagatgagagtgttgagtgactggatgttggattggggactttttccagttcaaggataatttccacagcagaataaaaactgctatcaaagagccatggccaactatttgtggtagtacaaggatggttttgtgctcaactgaggccagtttagaatagagaattatgtgggaaataaacagagaacatggcgatggaaccacgtgttgtaacttcgtaggcatccatactatggaagttccttccttctctccttcctgctgtctgtgcctcctcccagcatcgggcatctccatgtcctgggcctgtgccgggagagatataaaggacaccattggctataggctggaggactggcacggtcaggggagcccgtgaagtcagagtggcccctgaggaccagtcctgggatgactgggtccaactgaccaggcccctgctgaccagggccccatgcactgggcctctgccatgacctggccctcactgaatgggccctgatgaccaggaccccactgaaaagtccccccctgatgaggccccactgaccaggccttactgactgggctccccgtgactaggccccggctgactaggcagctgctccaccccccagccaagccaggcccccactgattgggtccaatcatcagtcagccagtggccagagctgcaccgaccaggtccccgctgatgagttacttactaaccaagctcctggaaaccaggttcgcactgaccaggcacaagaccccactgactaggtcttcatgacaaggccctcgctgcccggactccactaactaggcctcatgaatgagactttgactggtaatgtctttgctggttatgcctccactgtccaggcttccagtcatcatgtccccttgggccacgtccctcctgactgaacagtcccccagtgtctattccccgcactgactaggccctcacatccaagtcccactgaccagatattctggccaggttttcaccgactaggtcccactgccagactctaagaactaggccctactggccaggcaccctctgaccaggtttctgctgacaagaacctgctgaaaggtgttcgctgagtaggtcagtcctaaccagatcatccatgatcaggtccccactgatcatgtttccactgaccaggcccaaaaggactaggccccagtgaccaggcccatcactgagcaggcgctgctgacatagaacaggcccccactgtcaggcccccactgactaggccacaatgactatgtctcagctgaccaggccctgatgattaggtttaatggacaaaaccctcgttgaccaggtcccactggccaggtccccactgaccaggtccccatagatgagactctgagttaccaggaccccactgaccagacatctacagactaggccccaataaccaagacccactgaccaggccctcactcactgggctccaactgatgagattctgactgaccaggtccttagtgaccagactaggtcacttattgactaggccccactacccaggaccccaattaccaagcccccactaaccaggtcccaagtcaccagacccccactaactgtcccaactgacaaggcccccactgccgaggcttccactgaccaggtccacactgaccaggcctcgagagatgaggcccgacttaccaagaacccactgaccagagagacctccactgactgggcccaactgacaagggccccaccgacagggaccaactaacagggttccaactgaccatgtttttactgaccagactttactgaccaggccccacagctcagtatccagtgaccagaccctcactgactaggtctcactgtaaggcctcaagtgaccaggcctcactatccaggacacactcatgaggcttctactgccaggcccccactgattgggcccaactgaggaggccctcactgaccaggtccttaactgatgagattccaactgaccaggtccttagtgaccagacctttactgaccagcccctactaaccaggaccccactgaacaggtcctcactgacaagatcccagttgatcatgtccccagtgtccaggtttcactgactaggccccaccaacctggtcccctgacaagcctccaactgaccaggtctccactgactgggacccaacttacgaggcccattagccaggcctcactgaccaggactccactgactgggccccatctgatgaggttctgattgaccaggtccttaatgaccaggcctttactgaccaggccccactacccatgagcccagtgaccagaccctcactgaccaggttccacggccaggcctccagtgaccaggcctcactatccagaacccacggatgaggcttttgctgccaggctgactgcgcccaactgacaagattccaactgaccacttccttcactgatgaggtcccaactgaccatgtccttaactgacaaggttccacctgcccaggtcccaactgaccaggtccttaactgatgaagttctgactggccaggtctttaataaccagacctttactgacccattaaccgggaccccaatgacccagaactttactgaccaggccccactagccaggaccccaatgatcaggccccactgaccaggcctcaattgatgaggcctcaacttaccaggaccccagaccaccactgactagaccccactagccaggaccccctgatgaggcctccacttctaggccgccactgactgggctatactcacaaaacccccaatcagacctccagtgaccagtcctcactgtccaggacccacggatgaggcttccactgccaggcctccactgactgggcccaactgacaaggccccctctgtcaacgtctccactgactgggccttaaatgacgaggttctgactgaccaggtccttactgaacagacctttactgaccaggccccactaatgaggactccaaagaccaggcccccacagacaagaccacagttgattatgctcctggtggccacgtttcgctgactaggccccactgacaagtccctcactccctaggtccccattgaccaggccccaaatgatgaggcctcagcttactaggaccccactgaccagacctccactgagtaggccccactagccaggccccactgataggccccccaattccagaccccactgaccaggtccctccactgactgatgaggttcccactgaccaggtccttaatgatcagacctttactggctaggccccactacccaggaccccagtagccaggtccccactgaccaggtccctactgaacagacctccactgactgggcccccattgccagatttccactgaccgggcctcattgaccaggtttccactgaccaggaccccaataaccaggtcacactcaccaggcccccactgaccacatttcagctgaccaggcccatgctgaccaggacacactggtgtagccccaagtgaccaggccctctgaccagtcctctctgaccaggtccccgcagaccgggtcctcactgaccaggcacctgctcaccaggcttcctctgactaggtctccaatgattgtgtccccattgaccaggcccccactgaccaggtgctattgaccaggctgctgctgaccaggtcagcactgaccagacccccactcacaaggacctattcgccaggccctgctgaccaggtcccacatgactccactgaataggttccactgatgtggccccaataactcagctatattagtgtgttcttgcattgccataaaaaaacacctgagactgggaaatttataaagaaaagaggtttaattggctcatggttctaaaggctgtacaggaagcatgatgctggtatctattcggcttctggagaggccttaggaaactttcaatgatggtggaaggtgaaagcgtagcaggcacgtctttgcttttttttttttttttttttgagatggagtctcgctctttcgcccaggcggaagtgcagtggcgcgatcttggctcaccgcaagctccgcctcccaggttcacgccattctcctgcctcagcctcccgagtagctgggactacaggcgcccgccaccgtgcctggctaattttttgtatttttagtagagacggggtttcaccgtgttagccacgatggtctcgatctcctgacctcgtgatccgcccacctcagcctcccaaagtgctgggattacaggcgtgagccaccgcgcccggccacaggcatgtcttacgtggctggagcaggaggaagtgtggggggaggtgccacacacttttaaacaaccagatgtcatgcaaactctctcacaagaacagcgctaaggggatagtgctaaaccattaatgagaaaccgccccatgatccaatcactttccaccaggtcctacctccaacactggggattccaattcaacatgagatttgggcggggacacagattcaaaccatattgttccacctctggtctctcccaaatctcatgtccttctcatatttcaaaatactaccggctgcgtgcagtggttcacgcctgtaatcccagcactttgggtggccgaggcaggcagatcagaaggtcaggagatcgagaccatcctggccaacaaggtgaaacctcatctctacaaaaatacaaaaaattagccaggcatggtgatggaggcctgtagtcccagctactggggaggctgaggcaggggaatcatctgaacccaggaggcagagattgcagtgagctgcgatcgcaccactgcactccagcctggtgacagagggagactctgtctcaaaaaacaaacaaacaaacaaacaaacaaacaaacaaacaaactaccatgccttctcaacagtcctgcaaatatttaactcattccagcattaactcaaaagtccacagtccaaagtcttatctgagacaaggctagtcccttctgcctatgaccctgtaaaataagaaacaagtttgttacttccaagatacaatgggggtataggcattggatcaacattcccattctaaaaggaagaaattggccaaaagaaaggggctacaagcctacacaagtccaaaaccaagcagagcagtcattaaatcttaaagctccaaaataacttcctttgacctcctatcccacatcaagggcgtgctggtacaaggggtgggctcccaaagccttgggcagcaccacacttgtggctttccagggtttagcacctgtagatgctctcaagggctggccttgagtacttgtagctttttcaggctgagagtgcaagctgccagtggatctaccattatgatgtcaggaggacagtggttctcttctcatagctccactaggaagtcctccagtgggactctgtgtgggggctccaaccccacatttcccctccacactgccctggtagagattctccatgagggttccactcgtgcagcaggcttctgcgtggacatccagacttttccatgaatcttcctaaatctaggtgaaggtttccaagcttcaactcttgcactttgcactgcaatggtagtgcaggtccactgaaccatcaaagaccaggtacatgcctctgcctggtgttctcaactcatccaccagtgtggagctgtcatcccacttttcattacggtcatcatcgctgccctggctggcctggctgccaccagaattgctgaggtgatgactgcaggttccccagtccccggctctggaaagcctgcactggcagctggaaggcccctggtggtggcacttgttgtggctgcagcagcagctagagggctttgggaggcagcttcgaggaggtgggtaccatggtgagaagggccttgaagcctctgggtgacacattgccctagcaggctggggcaccagggctgctgtcactcaccaggcctggcctaggggcaatggagtgaggccttgtctctaagaagcatctgcatgacagaaaacatttctatactatacgtctgataatgcattaatatcacaaatgtataaaaactcaaacagtccaacagcaagaaaacaaatactataaaatattagcaaaggacttgatatagacatttctcaaagaagacatgcatatgagcaaaaagtacatgaacaaaagcccaagttcaataatcatcagagaaatgcaaattaaaaccagaatgagatgtcacctcacatctgttagaatagctatttcaaaaagtttgaagtgcactgagtctggatctttagtatctttatttcactacttcttctaatgtaaggatttggtttgttagtctttgatgtgtctttttttttgagatggagtctcactctgttgcccaggctggagtgcagtggcgcgatcttggctcactgcaacctccaactcctgggttcaagcgattctcctgcctcaacctcccgagtagctaggactacagacacgcaccaccacgcccagctaacttttgtatttttactagagatggggtttcaccatgctggccaggatggtctgaatctcttgacctcatgatctgcccaccttggcctcccaaagtgttgggattacaggtgtgagccaccacgcccggcctcaatgtgtctttttatggttttcagtaaagttttatggtttcacataggcctgggaatgtcttctaagtcgatttcatggcacgtttgctaatgtggatggaggctgactctttgttattgttactgtatgtttattattagtatgaaagattcaagatttattatatatacaatgtgcatttgctcaatttcctgaatgttgttaaacagtttttgttctgaaagttgaaatcgattaccctgcttttctatttgtactcatggcctctgtggataactacagttcaaattctttgacttacattctttcctgtttcctcctcttctctcttctggtccagactcaggcatccctcacagtgataaatgggagaggccttgccggcccttgtcttagacttttctttattgaaacacttctgatgtttgctgttgattatgatgtttgcacaaatatctttgcttaataagaattttatttttgccttttcccttccttccctcccttccttccttccttccttccttccttccttccttccttccttccttcctttcaaagcatgatctctgatgtttcttaggctggagtgcagtagctagtcacagatggaatcatagctcactgcagcctcaaactcctgggctcaagcaattctctcacctcagcctcctgagtagctggaactgcagtcatgtgccaccattcccagccagaagtttctattatcctatttggtattcttaatcatcacatattttattcaaggatatactaaagtgattacatattttttctactgtagtcttttgatcaaataaagaacctaaataatttattttttgagacagagtcttgctctgtcacccaggccgcagtgcagtggtgccatcacagctcactgcaacctctgcctcctgggttcaagcaattatcctgccttagcctcctgagtagctgggactacaggcgtgtgccaccacaccttgctaatttttgtctttttagtagagacggggtttcaccatgttggtcaggttggtctcaaactcccgacctcaggtgatctgcccaccttggcctcccaaagcattgggattataggcgtgagccactgtgcccagccttgattttatttttaatagtaaaatgtacttgaatagtttttggcgtaatctggtagtagaaatacacaagatatcaccattagatactgctaatcaaacacttaaaaggtgcaagtatccaggtgattttgtatacaatctgggtctttttgtcagactaacgagtataatgagatttgatatttgcttctgatgttgctggacaaactgggtaaagaaaaggattaagtcagggattccaagtttttaatacaagtactgcattaatatcctaaaaatttatatgtagccctgaagaagatacttaactcctgcagcttcagggctcaaaatgctgaaaagaaatcatagcatctcatcccataactggctgaattacaacaaaaattaaattcccaggcttgcaggatgcctacttttaaagtgggggtattcattcagaaaacattggatattaaaaagttaaaatgagggccaggtgcggtggctcacacctgtaatcccagcattttgggaggctgaggtgggaggatcacctgaggttgggagttcgagaccagcctggccaacatggagaaaccccttctctactaaaaatacaaaattagctgggtgtagtggtgcatgtctgtaatcccagctactcaggaggctgaggcaggagaatcacttgaagccgggaggtggaggtttcggtgagccgagatcgcaccattgcactccagcccctgggcaacaagagtgaaactctgtctcaaaaaaaaaaaaaaaagaaaaaagaaaagaaagaatgaaatgctggatcttcattggtttgctataaagtgattcaaaagctttgaaagatttgaatgataaagtgtatttttcctttaaaacatactcaactgaggaagatccaggagatacaccattcatcataactgtgagacatacatttgtgagaggagtcccagtatctccaaagagcttgatcaccacacttctctgtaggacagaacttacaatgaagattgttgccaccgaaatgaaaaatctaaatgcattggttataaccggatctcgggactgcaggatttaagtggcagcactcaactgcagctgtgaaaaaaatggtgggaatggttatttaacagactgcaaagtcaaagcaagcaataagaatagtttgactcatgggcttcctagaattagaatagagggcgcagtggctcatgcctgtaatcccagcactttgggaggccgaggcgggaggatcacctgagttcaggagtttgagaccagcctgaccaacattgagaaaccccatctctactaaaaatacaaaattagctgggtgtggtggcgcatgcctgtaatcccagctactcaggaggctgaggcaggagaatcgcttgaacccggaaggcagaggttgcggtgagctgagattgcactgagctgagatcataccattgcactccagcctgggcaataagagcgaatctctgtctcaaaaaaaaaaaaaaaaaaagaattagaatagacaggaagactactaagtttttacttgatctatataagtagaaaagttcaagtcaaacaaagccaaacctgaattatgaaacaaaaaacaaaaccaaagatttatggcttctcaattttttttttttttgagatggagtgtcactctgtcacccaggctggagtgcagtggcgcaacctcggctcaatgcaacctccacctcctgggttcaaacacttctcctgccttggcctcccgagtagctgggattacaggtgcgtgccaccacgctggctactttttgtattttttttagtagagatggggtttcaccatgttggtcagtctggtcttgaactcctgaccttgtgatccacctgcctcggcctcccaaagtgctgggattacaggtgtgagccaccacacctggcttggcttctcaattaatttccagtctcgaattagtttatagacccagaactccttgaatcaatgagatgctgggtccctatgaggaagaaatccagtatactattacaaatatatactgttaatttgtccccctcttttccccaaagaaaactatggccttttaccggagaacctttgcattgggaaaaaagaaataatcagacctttgaggaattactgaatacagtttctgaactgatactaattccaggagaactgaaatgacattgcagggcatttaccagagtaggagcttatggaggtcaggcgatcaatggagttttgaatcaattctaattcccagttggcctggtgggtttctcaaaccacccttcggttatcttccccgttctggaatacataattagattagacatactcagcaactggtagaatgccaaactggttccctgaccagtggagcgagagctattttggtaaaaaaaggtcaagatgaagtcatcagaactgcgtattcctaggaaaaagtcaaccaaaagcaacagcacattcgtacagggatttcagagactgaggccaccaggaaggtcttaaaagatccaagggtaggctgggagaggtggcactttgggagtgctgagttcagatttgggagcccgccgaggtgggcggatcatgaggtcaggagttggagaccaacatggtgaaaccccacctctactaaaaatacaaaaaaagttagccgggcgtggtggcatgcacctataatcccagctactcgggaggctgaggtaggtgaatcgcttgaacccaggaggcagaggttgcagcgagctgagatcgtgccactgcactccagcctgggtgacagagctagacttggtctcaaaaaaaaaaaaaaaaggaaccatccaagggtcatggctctcatttcatcctatgtaagtcactgaataaacataagagatcttggagaattatactggataaacgtaagcttaaatcatatggagactcccattgcagttgttgtaccagatgttgttttattacttgagcaaatatacacatccctggtacctagtgtacagctattcatctgcctaatacttttttttctctatcattgttaataaataccaccagaagcagttcgctttcaggtggcaaagacagaaacacaccgtcactgtcctacctcacacactagtaattggctcgggcttctgtaacagcatgccgactgagtgacttaatcaatgtattttcttctcacagttgcagaaggtagaagttataatcaagatcatcagaactggcatctggtgagatctctctccttgggttgtaagtgaccaccttctctatgtccttccatggactttcctctgtgcttttgtggtaagggagatctctaatgtctctttctcttcttataatgacttttttttttatagaaccctagccttataacctcatttaacctttttttgtttgtttgtttgttttgttttgttttgagacagagtctcgctcttgttgcccaggctggagtgcaacggcacaatctcggctcactgcaacctccacctcctgggttcaagtgattctcctgcctcagcctccctagtggctgggattacaggcgcccgccaccacgcctggctaattttttttatttttcatagagatggggtttcactatattggccaggctggtctcgaactcctgacctcaggtgatccacccgcctcagcctcccaaagtgctgggattacaggcgtgagccaccgcgcccggctctcatttaatcttaattacctccgtaaaggcctatctccaattacagtcacattgagggttagagcttcaacatatatattttagagggacatagttcagtcaataatagtgatatatcaactcttcagccttatgttacagcttagtttgctgggatcttggtcaccttttccttccacaaactatcacactggttctttacattgatggtattatgctcattgaatatagtgagcaagaaactcactagacttattggtatgagaagctcactctagacttactggtatgaaatttatgtcaggatgtaggacattaatccaacaaaatttcagaagccttctatctttgtgagatttatagggtcccaatggtttgggacatgccaacgtatcccctggaagcagaggagtaagttgttatatttggcttctactacaacaaaaaagaggcacaactctagtgggccttttgattttgaaggtaacatatttctcatttggtaagttactctggcccatttaccctgtgacccaaaaagctgctagcttttctttactcagcagaaaagaatattctacatcagatccaggctgtcgtgtcacttgggtcatgtcttccaatagagtcaaaggtgctgaaattgttgatggcagatacagatgatctttggagcttctggaaagctcctgtgttaatcacaggaaagattttggaggaaaatcatgccatcctatgtagataattgctctttttcttttcttttcccttctcccctcccctccccttccttcctttcttttctttttttctttcttttttttttttgaaacagcttttggcctgttcctggggcacagaaaatacactggaaaaatttatattgttaaaatgtccatgctggccaggcatggtggctcatgcttataaccccagcagtttgggaggccaaggcaggtggattgcttgagctcaggagttcaagaccagcctgggcaacatggtgaaaccttgtctctacagaaaatacaaaaattagcccggcatagttttgcatgcctgtgattccagctacttggaggctgaggtgagaggattgatttagcccaggaggttgaagctgcagtgagccatgattgtgccactgcacttcagcctgggtgatacagcaagaccctgtctcaaaataaaataataaaataaaataaaataaaataaaagtccatgcttcccaaagtgatatagaaagtaaatgcaagccctatccaaaccccaatggcatttattattaaactagacaaaaataattacagatttacttggaaccaaaagagaccttaaacagtcaaagcagtattgagcaagatgaacaaagctgacgatattatactctctgatttcaaaacattagaaagcaatgccatcaaaacaagatagtactggcataaaaacagacataaagaacaatggaacagaatggagagtcccagaataaatctaatatatgcatacaatcaactgatcttcaacaagggtgccaaaaatacacaacagagaaatgagagtcttttaagtaaatagtgctggaaaaattggatctctatatgcaaaaggataaatgtggactcttacttcataccatattaaaaattaacttaaaatggattaaatatttaaacataagacctgaaaacataaaatggctagaaaaaaaatatggaaaaattttcagaactttggacattgagatgcttttttttaaattagacttcaaaagaacaggcaacaggccgggtgtggtggctcacacctataatcccagcattttgggaggctgaggcaggcggatcacctgaggtcaggagttggagaccagtctggccaacatggcaaaaccccatctctactaaatctattttaaagattatttgggtgtggtggtgcactcctgtagttctggctactcaggaggctgaggcagaactgcttgaacctgggaggcagaggttgcagtgagccaaaattgcatcactgcactctagcctgggcaacagaatgagaccctgtctcaaaaaaacaaaatagtaagacaaagaacaggcaataaaatcaggacagacaagtgggactacctcgaatagaaaaacttctgaacaaaggacaaattcaacaaatgaaaaggcaacttaaggaatgagaaaaaaatagttgccaataatatatctgataaagggttaatatccaaaaatacaaggaatttctacaactcaatagcaaaccccaaataacaagattaataaatgagtaatgacctaaataaacatttctccaaagaagacataagaatggccacaggtatattttaaaaaatgctccgtgtcattaaatgtcagtcaaatgcaaatttaagtcacagtgaggcatcacctcactcttgtgaggacaggtatattaaaaacaaacaagcgtgctaaagttatgaagatactggaacttttgtacacagctggcaggaattaaaattggcagcaacaatggaaaacaacatacagttgtctcaaaaagttaaaaacagaattataggtcgggtgtggtggctcatgcctgtaatcccagcactttgggaggccgaggtgggaggatcacttgaggtcaggagttcaaaaccagcctggccaacatggtgaaaccctgtctctactaaaaatacaaaaaaaaagtagctgtgagtggtggtgcgcacctgtaatcccagctactcgggaggctgagacaggagaattgcttgaacccgggaggcagaggttgcagtgagctgagatcgcaccactgcactaaagcctgagtgacagagtgagactccgtctcgaaaaaaaaaaaaattacagtttgattcattaaactcaattctggggatacatccaaagggaatataatttggatcttgaagagctacatagttctgtgtctattacagcattattcacaatagccaagatatggaagccacctaaatgtccatgaaggatacatgaatgtgtcaagtaaaggtagtatatacatgcaatagaatattagccttaaaaagggagtaaatcttttcttttcttttttttttgagatggagtctctgtcacccaggctggagtgcagtggcgcgatcctggcttactgcaacctctgcctcctgggttcacaccattctcctgcctcagcctcccgagtagctgggactacaggcgcccaccaccatgcctggctaatcttttgtatttttagtagagacggggtttcaccgtgttagccagaatggtctcgatctcccaaactcagctgatcagcctgcctcggcctcccaaagtgctgggattacaggcgtgagccaccgcgcccggccagtaaatcttttcatttgtgacaacatgaatgtacctgaaggatactaaggtacacattaaggcacgattgaaagaagccagacatagaaagacaaatacatcatgatctcacatacatgtgaaatatgaagtaattatacgtgtagaggcagagagtagaatggtgttttccagaagctgagctgaaagaaaaacgggggttggggggatacaaagtttcagttacccaaaatgaacaaactggtctggatagtggttttttttttttttttttttagtaaaaccataaaagctcaggcaacgaaaacaaaaacaaatggggttatatcaacccaaaatgcttctgcatagcaaaaaaaaaaaaaaaaaaaaaaaaaaaattaacaaggtaaagagaaaagctacagaatggcagaaagtattttcaaaatacccacccaataaggtattaataaccagaatatacaaagaactcaaatgacttaatagcaaaaaacaaacaaaaaaagaatctaaatttaaaatgggaaaggatctaaccagatacttctcagccaggtgcagtggctcacgcctataatcccaacactctgggaagctgaggcgggtggatcactggagctcaggaggtcaagaccagcctgggcatcattttttgtagaggtgaaataccacctctacaaaaaattcgctgggtatggtggtgcacacctatagtcccagcaacttgggagtctgggatgggaggatggcttgagcctggggaggttgaggctgcagtgagctgtgattatgccactgcactctagcgttggtgacagagagacactgtctcaaaaaaaccccaaaaaacaaaaagcaaacccaacaacagactcctgtcttcagccaaaaagaccaggaaagacaccttatcaaacaaaacttttatccaatgtgccttctatgctgggataaaatgagggtagatacaataggctttctttcccttttgtgttttataaattgtatttgaatatcaaggaacaattgaaacattgttaactacgataatttctgaatataatgtaatacgttgatctaacactaaaaaagctatactcaaaaacactacaaataaatgaaattttaaaacatgttcaaattatctacatgaagaaagtaaaaatcacacagaggaacaaaacagagagaacaaacagaaaacaacgtatcaggctagttttaacaaaattaacttaactgttaaatgttctgaattaaccaagtagatctccgctgacacacaacaaaaacatgctggccaaagtggatgaggtgaagttcacaatcaacacccaaatgaagaaggtgctatgtctggctgtggctgtcagccacgtgaagatgacagacgatgttacacacagacgatgtgtgtaacattcacctggctgtaaacttcctgatgtcactgctcacggaaaaccggcagaatgtccggcccttatataacaagagcaccaccggcaagccctagcacctgtattaaggcacatttgaataaattctactgccaccagtcaaaaataaataaataaaataaaataatcaattagagacaaagattgaaaacattgattttttttttttttttgagacggaatctcctctgtcgcccaggctggagtgcagtggcgagatcttggcttactgcaagctccgcctcccaggttcacgccattctcctgcctcagcctcccgagtagctggcactacaggtgcccgccaccacgcccggctattttttatgtatttttagtagagacggggtttcaccgtgttagccaggatggtctcgatcttctgacttcgtgatccgcacgcctcagcctcccaaagtgctgggattacaggcgtgagccactgttcccggcctgacaacactgattaataaatatgaccatgcatattctctttagaagaaactcacttccaatataaaaaggtaaatttagaataagccctctccctctccccctccccctccctctcccctttgcacggtcctcgtctcccctttgcacagtctccctctgatgcggagccgaggctggacggtactgccgccatctcggctcactgcagcctccctgcctgattctcctgcctcagcctgccgagtgcctgcgattgcaggcgcgcgccgccacacctgatggttttcgtattttttggtggagacggggtttcgccgtgttggccgggctggtctccagctcctgactgcgagtggtctgccaccctcggcctcccgaggtgccgggattgcagacggggtctcgctcactcagtgctcaatgttgcccaggctggagtgcagtggcgtgatctcggatcgctacaacctccacctcccaactgcctgccttggcctcccaaagtgccgagattgcagcctctgcccggccgccaccccgtctaggaagtgaggagcgtctctgcctggccgcccatcgtctgggatgtgaggagcccctctgcccggccgcccagtctgggaagtgaggagtgcctcttcccggccatcatcccgtctaggaagtgaggagcgtctctgtctggccgcccatcatctgggatgtggggagcacctctgccctgccgccccatctgagatgtgaagagtgcctctgcccggccgcgaccccgtctgggaactgaggagtgtctctgccccgccgccaccccatctgggaggtgaggagcgtccctgcccggccgccccgtctgagaagtgaggagcccctccgcccggcagccgccccatctgggaagtggggggcagctcccgtccggccagccgccccgtccgggaggtgtacccaacagctcattgagaacgggccatgatgacaatggcggttttgtcgaatagaaaagggggaaatgtggggaaaagaaagagagatcagattgttattgtgtttgtgtagaaagaagtagacataggagactccattttgttctgtactaggaaaaattcttctgccttgggatgctgttaatctataaccttacccccaaccccgtgctctctgaaacaggtgctgtgtccactaagggttaaatggattaagggcggtgcaagttgtgctttgttaaacagatgcttgaaggcagcatgctctaagaatcatcaccactccctaatctcaactacccagggacacaaacactgtggaaggcggcagggccctctgcctaggaaaaccagagacctttgttcacttgtttatctgctgaccttccctccactattgtcctatgaccctgccaaatccccctctccgagaaacactcaagaatgatcaataaatactaaaaaaaaaaaaaaaaaaaaaaaaaaaaagcagaataaaatcagaaaaaaaaaggtaaatttaaagtataagaagctgggcaaggcgtggtggctcactcacgcctgtaatcccagcactttgggaggctggggtgggcgaatcacttgaggtcaggagttcaagaccagcctggccaacatagtgaaaccctggctctactaaaaatacaaaaattagccaggtgtggtggctggtgcctataatcccagctacttgggaggctgaggcaggagaatcgcttgaactggggaggcagaagttgcagtgagccgagatcacgccactgtactccagcctgggcaacagagtgagactccatatcaaaaataaatttaaaataaataaataaagtataagaagctggaaaaagatacaagtaatcaaggaaagcatgagtagttacaataatatcggataaagtagatttcagagaaaaaaattgagacatggagagaaattacataatgataaaaagcttaatccacccagaagacccagcagtcctaaatgtgtaggcataaatcaacagacatgaaaaatgtgaaacaaaaactggaacaaacagaggagaaacagacaataagacaaatacacaattatcgttggagatattgacatttttctctaaacaatagaacagagaaaatttcagcagcaaatctaaaaaaaagacaacagttcaacaccatcattcatcaacaggatctggttgacatttgtagagtaatttaatcaacagcagcagcatatgcattctcttcaagggctcatggaacataaagtaagatagaccatctcctaggccatgaaacaaacttcaacaaattttaaaaatcagattacacggagtgtgttctcggatcataatggagtcagactagaaatcaataatgtgaagacaatgcaaacatctccaactcttgcaagcttgaaggggaagtccctgggaaaacaaaaaatacattgaccacaaagatgatgaaaagacaatggatcaaaatttgtaagacacaactaaagcagtgtactgaagaaactgatggcactaaactcatatattagaaaaggctggtcgggcgcggtggttcaagcctgtaatcccagcactttgggaggccgaggccaggagatccagactatcctggctaacacggtgaaacccggtctctactaaaaatacaaaaaaaaaaaaaaaaaaaaaaaaaaaattagccgggcgtggcagcaggtgcctgtagtcccaggctgaggcaggagaatggcatgaacccaggaggcggagcttgcagtaagccgagatggcgccactgcaccccagcctgggcgacagagcaagactgtctcaaaaaaaaagaagaaaaaaaagaaaaaaactaagtctccagataatctaattttccacatcgataacctgggaaaaggtcaaacttaataaactaaacccaaacaaaagaagtattaagaaagaaataataaagataggaagagaaataaagttgagactcagaaagtaatagagaaaaaccaataaaacagacagctgattttttttgaaaagatcaattaaatagacaaacctcaagcaagactaagtgggggaaaggacaagacacaaattaccctgtcaggaatgaaacaagggatatcggccaggcgcggtggctcacgcctgtaatcctagtactttgggaggctgagtcaggtggatcacaaggtcaggagttcgagaccagcctggccaatatggtgaaaccctgtctctactaaaaatacaaaaaataaaaattagctgggcgtggtggtgggtgcctgtagtcccagctactcgggaggctgacgcaggagaattgcttgaacccaggaggtggagattacagtgagccaaggtcgggccactgcactccagtctggctacaaagcgagactccatctcaaaaaaaaaaaaaaaaaaaaagaaacaaaggatatcattacataccctgcagacataaaaagaataataaagtgtattagtcgtctagggctgccataagaaaataccagagtctgggtgagttaaaataaatcatctcacagttctggaggctggaagtctaagatcaaggtcccaggacagctggtttctcctgagccctctgcgtatggcgccaccttcctctgtatcctcacatggcccttttctttttttcttttcttttcttttttttttgagatggagtctcactctgtcaccgaggctggagtgcagtggcacgatctcggctcactgcgacctccgccccccaagttcaagcgattctcctgcctcagcctcctgagtaattgggattacaggcgcctgccaccgcgcccggctaatttttttgtatttttagtagagacggggtttcaccatcttggccaggctggtcttaaactcctgacctcgtgatccacccgcctcagcctcccaaagtgctgggattacagccgtgagccaccgcacccggcagggctttttcttctaattggcccgttctagtgtttctctgtcccttctcctttattttatttatttattcatttatttatttattgagacagagtctcgctctatctcccaggctggagtgcagtggcacaatctcggctcactgcaacctccgcctcctgggttcaagtgattctcttgccttagtgacctgaatacaggtgtgggattacaggtgtgcgccaccatgcccagctaatgttttatttttagtagagccagggttttgccatgttggccaggctggtctcaaactcctggcctcaagtgatccgcctgccttggcctcccaaagtgctgcaattacaggcgtgagccacagtgcctggcctctatctcttcttatcatgatgatagtcatactggattatggcctcactctgatgacctcatttaacctcaattacctcttaaaaatctccctctccatacccagtcccaatgagggttgggacttcaatatgaataactctatacacataaaatttaacagcttagatgaaatgatttaatcactcaaaacataaattattataattacccaattaaaaaactgatatttttgaattgccctacactaggaagaaactgaaatcataattttattttttatttatttatttatttattttttttgagatgaagtctcgctcttgtaccccaggctggagtgcaatggtgtgatctcggctcactgcaacctttggaataatgttcatgagcccaaagacaagacaacctttggaataatgtccatgagcccaaagacaaaattcccagcttaataaatggcccaacagcatcagaattagaagatttagaagtaactagaattcttcctagctccactggaaaggatgaacatgggggctcccgcaagataagtacagggccagtggacagtgactggtctagtgagaatagaatcccaaagatcctgggaaataaaattacacaacaagcttccaggaaacaagtggaacaaacgaggcaacctcgcagatactaccaggaatggataagcagaagagggtcagagccacaaaatctaaacaaaagacaccaaaccacaagaagcacccagccctgtgaacaccagctgtggctacatctgtaccaatcttttcagacagctgccgtgggactgctgagagcagccacacaccaaacagcagtgcatctgaacacaagtcccaagacactcctctctattaatcctcattttgagaagatggatatggttatgttacaacatccccatacaacacttgtgggcgagggtaatcagacaccctcacctaaagagggcacaggaaggaggaggatgaaaacagagggctagggaagggatgtgtgctctggatcacatagactttccccacaggcactatttaaaacaaaagaagagccctagaaatgtgctgtggtctccctatacttcctcatcttgccacatgcataggtgccacgtggttttgttttgttttgttttttgagatggagtttcgccctttcgcccaggctggaatgaagtggcttgacctagactcactgcaacctccgccccccgggttcaagcgattctcctgtctcagcctcccgagtagttgggattatagcgcctaccaccacgaccggcaaatttttgtatttttagtagagatggggtttcgccatgttgactaggctggtcttgaactcctgacctcaggtaatctacctgcctcggcctcccaaagtgctgggattacaggcttgagccactgcgcctggcagatgccacaatttttttttctttctttacacaggtgctgatgaactcaggtgtaattaaccctaaggggtaaattattcactaagtgcagtaatagggtccaatttttatgaccaggttttcagttctttgatattgtcctacattcagaaatcacaaatgaaaaatactggaatgtgtgacgtgaacaatgtcttggaggttaacatccaggtttttacatattagatgtaacaacatgaaagctggtaccatctgggaaccaaaggaactgtccctgagaacacagaattttagggacatcaattattaagagtttacatggaagcagaagtgctcctagatgtttccattatctagatagaaaaattcaacagatgagccccagtgagtcaaggaacatctctgacagctgtgggtgatgggctttctatccaaagcagagatgtgaaacctgacgggtttcaattgaccccgaagtgctccatatctcaaaagtcaatcccacaaagctggaacgctatctgttcctgagggatcaggtcccacctgtgtctctaagacactgccttgagatgaggccgatgatttcaaacgtaaattgcctaaattatcatcagcttcatgttgtgttttggagcttgtccacttaagtgggttgataaaaaatggctcacaagacacatgcctgggaaatggggttttcttctttgctcttggcagatcctgggcaaccctataattaaccttcttgatttctcaattttcacattcgcgaaaaaggtgccagtgcgcgtgacatttccctgaagccacagcccttgtcaccccctgcaaagctctgaagttgtgcacaggtaggccaggtggcagatttctctcaaaagcggctgagctcgcgctctggctagggaaggcagaggcctgcggcacaaagtacattgtcttagacatcaggacagtgtctatagcagtttaggaaagaaggcggctccctgggctggagacgacgcaatgctctgggaagacccctgggtgcgggtgagagaggaatccgagctgcacaaggccaatgaggggaggacgacccgcccgatttagataaaggtaaggcatacttcctagcttaataccctcctcaatgcccagcccagacctgcctttcacgtccctagctgtattcactctccctggcgaccgggcggcgtagaatcggcggccagcagtgctttagacacaggttaagtgtctgcccctccctccagggttacgcaccaccccgatgcatactgggattgtagttctgaagctacctacccatgggctgagagcagtaaagagactacaactcccagcataccaggcgcggcgcgcaccgccctgccccttcctctggggttgcgaaccgcccccgagcctggtacaggctgggattgtagtcctgcagccttgtggccgaagggctgggactggccatgagattacatgtcctagcatgctcagccaggcgcgcgcagctctgccccttcctccagtgatgcgcacagtccctgatccctgtgcacgctgggattgtagtcctgcagccctgcgatcacttgcaggtaacaagaaatttcagcttccggcatgatgggcgaaggcccccaccttcagcctcgctcctccatgccttcagagctgttccgccatgcagacggggagcctgcctgttctttaacctctcctacctgatgggagaggacaagctaccaggacagcttgtctcaccaagaaattgtgataccgcatcccccaacgtgctggcttcctgacttccaaagttgcggtaagtttgatttctcacagaactgcaagagtccgggatcgtttcccagcctgcccaaagttgccatggttctcaccctctgggaggttggcacacccagtgacaccttgtgtcccttgaaactaatctgtgtcaccttttaggcttttgagaccacttgaactctgactttgtggcatttattaccaaatctactaaaatgggtcaactgtcagattttaactccttttccacacatgttggttaggtaatctgttgattagacatggttttctccaaaaggggattatctcttcctgattgcctccaagagaaggatgaaacgattgggcgctctaaggatctatttcccaaatttgagattccacactgatcattcctgggcaaaatgtgtctttctgttccataaccacaatcttaggccagcctgagtgccatcccagcccaatgggggttatggaactccaacttagttctgtttaagttttatgtaaatatccttgtctctgtttcacctggctctgttagataaaatgtctaggagaaagtaggaggtgacaagaatacaggtgaaatcataggtactggaatggggcacactgattctgtggaagcagagggagaacaacaacctaaaacccagggaatgaacaacttagacctcaggagctgtggggaatggaggggcattaataactttttgtctttctgaattacccctggtgcaacccagaaaagagtctgggaatcttgttgggccaggacaaaagtagttttagttagaccagaaggtaaggcacaagctgtgaattcatctcctcctttggctccccacattaaccttaagaatcctttgagactgttctgtctctctgtgatgtaggtgtggaattctagggggcagcgtgcactctcagtgcccagctgtctgagaccacagttccctcagatgatgaatgatatggtttggctgtatccccacccaaatctcatcttgaattgtagctcccataattcccgtgtgatatgagagggacctggagggaggtaatcgaatcacgggtgtgcatctttcccaagctgttctcgtggtagtgaatatatgtcacaagatctgatgattttatagagggcagttcccctgcacatgctctcttgcctgccaccgtgtaagacatgacttcgctcatccttgccttcctccatgattgtgaaccccactgccctgacctacagccatgtggaattgtgagtcaattaaacctctttcctttataaattacccactcttgggtatgtctttattagcagcatgagaacagactaatacaatggagaaccatcgcttttttctgaagagactcagtcccccatgggtaagcttaagctggacgctaggcagcactgattatattttctccttctgtgaactggagctcctccttccattttcctaccaccactaatctttttggtcaatatttggataaattagagacatagataagggaatgttagccccagcatagctagactcttgcttatttctcttcccggtttatgaaatcaattatgttggcacagagagatacccttagatggggtcactcaggagcaattagagcagtgtacttctagagaagctgataggacagggcagatgtgccagtgaggatcacagcttctgtctaaatttttgagtctatctgtgtgtggcagatgaattcaggaaagatcccagatccctggaaagggaccattaagagaggattcatgtagatcagaacactagggcatgtgttcatcagtgaccttctaagtcagattgacagggttaagtctgtggtagggctacagagcaatgcttgcccatgaaagcctctgatcatgtgtaaaatatgtggttctggcacggggagacatctttatctgacagaacattgtacttctgtggatgtgggattctttgctcttccttaacagtgcaccactgactgattgtttgagaatcacgcatacataggcctgtttattttgaatttcttaaatattggaacaggaaaaaacatttttatccactttttttcttttttttgagatggagtcttggtttgtctcccaggctggagtccagtggcgcaatctcggctcactgcaacctctgcctcccagattcaagcgattctcctgtctcagcctcccaagtagctgggattacagatgcgtgcctccatgcccagctaatttttagtagagacggggtttcatgatgttggccaggctggtcttgaactcctgaccttgtgatccacctgcctcggcctcccaaagtgctgagattacaggcgtgagccaccacgcctggcctttattcactttcaaattgaataagagcatgagcaacttcagggaaaatgtcacgggaggaaactctggggccctgcccatccccagaaacctcagaaatcctgatacaacctgtagaattcaccttatcaacactgattcatttttttgtatagatttatctttcattgggcctttattttgttctatgtcatgaagaacatgaagaataagtcatttctttcctttgtggtaggaacatcaatttttcacatgtcaagtattaatgatgccatcctccacatagtttttcttgtttattaaatttttggtttggtctaaatatttgtgtccccctccaaattcatatgtggatagtattaggcatgcgacctttcgggaagtgactaagccaagagagcgccatcttcctgaatggaataagtgccctttttaataacattgaagggagtgtccttgtctttcgccatgtgaggacacaccaagaaggtatcatctatgaggatcagggctgtcatcaaacaccaaatttgttggtgtcttgatctagcactttccagcctccagaattgtgagcaataaatttctgttgtttttacattacccagcctaaggtattttgttacagcagcctgaatggactaagacactttcttaggcactttagtctatttctgaatttttagttccaattatctattagcttttatttatttatttttagacagagtcttgctctgtcacccaggctggagtgcagtggcacaatctcagctcactgcaagctccatctcccaggtttgcgccattctcctgcctcatcctcccaagtagctgggactacaggtgcccatcatcacgcccagctaattttttttgtattttagtagagatggggtttcaccgtgttagccaggctggtctcgatctcctgacctcgtgatccacccaccttggcctcccaaagtgctgggattacaggcctgagccaccacgcccagctgatctattagcttttttaatcaagatttttcacagggctggacaatattatctgttttttttttttttgtttccccagagttttcttggctcttcttgtcttttcatctatatgctgttttattttatgtatgtatgtatgtatgtatgtatgtatttatttttgagacagagtcttgctctgtcgcccaggctggagtgcggtggcaccagcttggctcactgcaacctccacctcacaggttcaagcaattctcctgcctcagcctcctgaatagctgggattacaggcacctgccatcatgtctggctaatttttgtattttcatagagacagggtttcaccacgttggccagcctggtctcaaactcctgacctgaagtgatctgcccacttcagcctcccaaagtgctgggattacaggtgtgagccaccgcagccagcctatatgctattttatagtaaaatgcctacctccaatatctaatggtatctatattagaacaaaatttattttataaactaccttgaggacaatttatattgatagtatattgtttttcggtctaagaacatgtaatttttctatttgcttatgtctacattcatatattttatgaatgtcgtatgtcttttctcattctgtaaacctttgtgtaatatggattcctagtttattttattcctctaaaaagtaatctgagacacaataaaattgtaaagagtttatttgagtaacagcaattgattaattataggacaccagtctaaaagaggtttaggtttcactgacagtgtaagaggcaactatttattggaaaaatgtagaaacaaattatttgattagtggtagttacaaacttgtttcttcttggttttttgtttgtttaccttgttgaaaagtccctagttatataaggttgttggctacttctgattggttgagcttcatttctgtttttctttaaaataggcagctataagaaataattcaagttaagtttagccaggcatggtggcttacgcctgtaatcccaacaccttgggaggcggaggcaggtagatcacctgaggtcaggagttcgagaccagcatggccaacatggggaaaccctcatctctactaaaaatacaaaaaaattagctgagcatggtggcaggcgcctgtaatcccagctacttaggaggcccacagtctggttaaaactccaactgccattttttctctttctgacacataaagtgtaaagggttttgtcaggtcaggtagccccagggctggcgccgacatgagtttttcttttaactcacgaaaagctcgttgctgttggttgtaatagatgtagtttatccaatttacatttttattaactgtcacccaccaaaatattgactcgaatcctgcagctatttgatttcaagctttaaattgatttggtattccccatgggactccagttgcatctaaatagacgtgagagttgaaagacccataaggggcttctctcgctttacgatgtcttatttttcttccctctggttgatgaaatgccagggtgaaagggatagccaattggactaaagtacaagtgccactccagttattggcagaatgcccagtaaaggtctaccacaatatcaccacacattagctcggggatgaacaagggctgattgataagctcttgaaaattcttaagctcactgcatcccttcaggtctccaaggaacgctaagtttttctccctatcatgagagacacaaagtgaacttagtgttgggagatggaggctggatggccctcggggactgacctgcagggtgccggactttgggatatagcagggagagcttggcacgacttattactccaggctgtagaatcctgaaaaagagctaccatgcagcccatgcctggtcaactggaggactaccttagtggaaaggggacaatctgggcctctggcctgccatgtgcacaagcataacaattgcttttgtttaacgtgggatggaatatttgatccattccaaccaggcatttgcatgttggtatcctgtcttaattgccaaagttcgttttaagtctttaacttatatgatcctctagtaaaatgaatgcatgattttagggaattacaaaaaccatttggggcagtccacacttgctctttagtggtccacagaatgttggaccaactacagcataaaagctctacgttggggagcaagactcctggttgacactggagtctttatcaaaatttccccagattaaatagtcctaatttactaatgcccagtctgaggagagtcaggggggacagaggtacttttctgaagtggagagctgtctttcacttgagagtccccacagggtataacaaggcaagcattaaatgcaatagtttgaggcaaaattgacttggttatgttaataactagatggtcagcaatagaatgaggaaagaagaaagagtaatagaacagattttgaaagagttaaaagttttcttagctttagtttggtagggttttcccctgggactatggcccaagactctggagggggcggtgctttcttgactcagttgtgatgagtccatcctttttccattgtacgaacagcagtctcagtggttagcagcacaaggtaggggccttcctagcctggctcctttcttttcaccttttgatgagaatgtgatctttaggctggtgctggtttgctggaaattctaggggtggtacatgtgctaaaagacttgtagttttgaggtaaaggaaagtggaagataaaccaagtatataatttctaagaaactgaccttttgttttaaatgtggggacatcagcagtggactttatagtctttggtgcctttctactgagaaatttcttttagcacctgcttttattagtttttagaccaaagaaagccaaacaccattatatatttaataatgcttcttgtatgatttttataccagataagctaaatttcaccattatattagtgtgttattaatgtgaaacttaattttaataaaaccttgtagatatatttatccaatttttaatgtcagaccataaggtaagatttttatagactctttttaaccttttataatttttgttaaagagtacgttagtgctttaagaaaaacccgttgtgtttttattttaatgtccagttcacaaaaaaactggatgatacccctttaactttagctaatatgtttacacacagaattttctttaaaattaatgtttaaaaacttgcttaaaccttcaaaacaataatttttttaaccttttaatgtaggtaaaaatttacattcttatgcctccttataatccttttaccaaaggtatattttactttccttatacaccttgcacataaactgtttttttcaatagttttacattcaggaggcctagctacttttaaattatacaacatttcttgcataaattctttttttataacatttttctctttcatgacttttgcagacaattctttgacgtgcctcaactttctgacttattacaaacctttctttctttaaacaaccagtttctttatttcaggacaagaatttaccatataacactctttttacataaattcttcccccacttttttcccttttttttcaaagatgataaccattcttttccaaagtgaacttcctttatgtctgtggacgagactgtctaaggccacaagattagaagttactataatacatgttacactgttaacttttagcaaactttacttttgttgaaaaccttgtaagtttgggattttaattatcctttgccattaataagaccttgttttgtccaaattaatttagaattggtatagatggctttttttttttccttcaattacctgggaggaacgattgatcctcctgtcctgaagggagttcctcctaggtctggtcggacctttgtatggtaattaagatttagatgccctgttaggaaaacttctgggttaagggaattttcagtggttaatgttaaatcacacttttttttttttttccttaggatacttctgaactggtgaggtgtgctcacaatgaggtttcctcacaatgaggtttcctctaaaagttatttttttactttcttctgttagcaaagcagttgccgctacagattgaatgcatctgggccatctgcgggttactgggttaaggatttttgataggaaggctacgggttatcagtggcctcagtgctttcagaatacgcccttgtttacactgacaacaaagtggtattggagtcttatagggttatggagaataccttcaattatcaattataggttttaaatttaccctggcttttaaaggaatagggtacacttttttcttaactacttgtatatctctctttctttctctgattttctttttctctttgactttccttttgcctctgtctctttctctttctctgcctctctctctctttccttgactccctctttatctctctgtctcttcctctttctctctctgctggtctttccttgcctctgcaagcttgcttatgctgctgttctctcaaccattgtggggtgggggtctaaaaccagctataaccaagtgtccatgtacaggaactggtctgggtgccctggcttacaggttaccttgtgccgtacctttgaaacaagggacctgtccaatcttccttctgatggccaacccacctctaatgctggccagtctatttcacacaaagttctaagttttcctggtatcacagtaacactgtaatctcccttaaatcctttcttgaaaattttcaacatagctcctactggggcaggcttactttgtgcctgacccatgcttcttcaagacaaaacaccacgctcgcaccacacgcacaccacaaaacaaataacgggtaaaaagggcacacacatacttttacagtttacaccaaaccagaatcaataccaaaatcggggtatctagaaatccaagcaaggtcaaaaccaaaaccaaagtatcaagcaatccaagtcaagtcaaaaacaaaaaccaaagtgccggtacaggcacgccataggtgatcaggccacacttccactcaaatggagtgggcaagttccaaagactagtcttaccaagtttcagatgtccagactccaagtgccagttccttcccggtgttcagtcactgcattgatcctccgcgggggctgccacacgctgctctggtgaggcgttccaccagggaatttgcttacccgggagcgctctcaggatccgcatcgctcaagctggccggagtcccccgcagggatgctccacagggcaggcctaagccgcctaacaggctgcctcaactgtccgttaatcacctcgcttcccagtcagggaaccaagaaatgtagcaggacgagccgtagacaaaacccctcagacaccgagttaaagaaggaagggctttattcggccgggagcattggcaagactcacgtctcaaaaactgagctccctgagtgagcaattcctatccctcttaagggcttacaactctaagggggtttgcatgagagggtcgtgatcgattgagcaagcagggagtaagtgactgaaggctgcatgcaccagtaattagaatggaacagaacaggacagggattttcaaagtgcttttctatacaatgtctgtaatctgtagataacataaccgattaggtcagggctcgatctttaactaccaggcccatggtgtggcgctgggctgtctgcctgtggatttcatttctgccttttagtttttacttcttctttctttggaagcagaaattgggcataagacaatatgaggagtggtctcctcccttagtggcgcatgcctgtaatcccagttacttgagaggctgaggcagaagaatcacttgaacctgggaggcggaggttgcagtgagccgagattgtaccattgcactccagcctgggcaacaagtgcgaaaccccatcacacacgcaaaaaaaggaggacactatggtaggctgcttgggagttaggagctgtatctgacatgaggccaggagaagccttggcaaagctcacatgaccttcaagctcctttcactccaaaacatgagcaaggactgtgccgttgctttccattcctcaggtggggacaagaagtggaaacctatgcagacactagataggttttgttttacaggcaaggtaagaagaactacagaggaagaacctaatgcagacgtttcccaggagactttaactgaagtatcagcaaactgaaaggtaacgagagaatcttgtgcctctgagggtgtctttcccatggatccctgctcagttgcctttcacgggccccctgatttgcgtgaactcctgacctcagatgatccgcctgccttggccctccaaagtgctggaattataggcatgagccaccgtgcctggcctgttccatgcattaaaaaaaaataaaaaaattaaaaaaaatcagtgagaacaagaagaaatgtaaatgctgggcttttcatataaatccagggaattatgggacagttagtacccacctcccagggtattataaggataaattcatgtcatcttcccagctccgtagcgtgcttctgagcacacagagcatgctccataaacattgcattaacgcatgtgtgcatgttgttttccaaatgcagacttactcagacatgagctgccttctccagcctctgtaaagtttaaaggaccagcagagtgtgccatgttttaggatagtgattggtggtttttattttggactgaaagcatttatgttgtgagaagagtataggtttaaggaactgtgtgctgtggcactttgtctagttgagtgctgctataagtgatctagggcaagtagggtcagcattagctgtgaatgaagccaatccatggacccctttcaaacctgcagaattggccaggcatggtggctcatgcctgtaatcccagcactttgggaggccgaggcgggtggatcacttgaggtcaggaggtcgagaccaggctgaccaacatggagaaaccccgtctctactaaaaaatacaaaattagccggatgtggtggcacatgcctgtaataccagctactcgggaggctgaggaaggagaattgcttgaacctgggaggtggagcttgtggtgagctgagattgcgtgccattgcactccagcttgggcaagaagagcgaaactccatctcaaaaaaaaaaaaaaaagaaaaaaagaaaaaaagggaaaaaagaaaacattaaatgcagcaagatgcaggtcagagcatacctccatttgtgtgctcttgtggacaaaatttaaatggcaaataagattttgcatttattgacgtttttctttacattgctgtaagtacaaatacccatttatcctttgacctcctatatctttattctgtatgcatatgaaaaaaaatgctagatctgtatctagattatacatgggtaaacacaacatatagaattatatgactttgcctatgtagatatttatgtatacaatagatattaatcaacattttaaattccccagcctacactgcggatgcagatataaacttactctcacctatatggatccataccatctcagactggaaaacagccatacaaggttatgtttaaacatcaataaagcttcacatataggtgcatggcctgggaagtatgtttttggtaaagccatcttagactctagttccagcttagcatttcagggccctgcttcctttctcactgtatgcctgtgtgattcacatttgccatttgggtcgattgacttatatccatctaagctgatctaagtggtttattaaactcatctgggctgcagaagttgagaaggaaagcaacctctgacctacttattctgaggcttgtctacaggacatatgcaataatgggaattacattgacatacctatgttacccattttctgtttttttttttgagatggagtttcactcttgttggccaggctggagtgcaatggtgcaatatcagctcactgcaacctctgcctcctgggtacaagcgattctcctacctcagcctcccgaatagctgggattacaggcacctgccaccacacctggctaattttttgtatttttactagagatggggtttcaccatgttggccaggctggtctcgaactcctgaccacaggtgatccacccacctcggcctcccaaagtgctgggattacaggcatgagccaccgtgcctggcctttctgtgtatatgtttatctagccaccgatatcatatctatatgtataaaaaagaccaccaaagtgctcagaggtgatttttattttccattcaggccaagtaaatccaatcagccattagctcagtgaagatttgtcaaatccaagccacacaccaaatcacgttatgctaaatgtgaaaatgtcctcattactgggcaccaaggtgttttaaattcagagtctaatcaaaacagctcatggggttctgtccatccagctaggacgcttcagacataccagtgggcctaacctttttcacaaggagctctggcctggccaacaagaatcacctttggtgcttcagtgcagtgtcaccatcacctgtttgaaatgcagccaggtaacatgtaccattttatttgctttcagtatcacagtctatcttctaataagaaacctaggcctctggctgggtgtggtggcttacacctgtaacccagcactttgagaggctgaggtgggtggatcacttgaggtcaggagttcgagaccaccctggccaacatggtgaaactcccatctctactaaaaatattaaaattagctgggcatggtggcatgtgccctctaatcccaggtactagggaggctgaggcaggagaatcacttaaaaccgggaggcggaggttgcagtgagctgagatgatgccactgcactccagcctgggcaacaagagtgaaactccatctcaaaaaaaaaaaaaaaaaggatttttttttttttttttttctgtgctgggtttacttagcatacctttcagattcatgaatgttgcaaataacaagactttatttttaagggctgaatggcatttcattgtgtacatataccacattttctttctccattcacctactgatgaacactcaggttgattccataccttagttattatcagtaatccacttccttccctttcatttgtgtttgttttgttttgtttgagatggagtctcattctgtcacccaagctggagtgcagtggcgcggtcttggctaacagcaacctccgcctcccaggttcaagcaattctcctgcctcagcctctcgagtagctggtattacaggcacgcaccaccacgcccaggtaattttgtatttttagtagacatggggtttctccatgttggtaaggctgatctccaactcccgacctcaggtgatccacctgcctctgcctctcaaagtgctggaattacaggcttaagctaccatgcctggccaaaagcctaggtttctttctatgtaagcctaggtttatttctatgtgaagtgtaaaagaaatttaaactcatagaagcagagagtacaataatgaaaaaaaaaaaaaatctcctatggggttttttgtctgattgagagcttcttcatgatctttcagggattgtattttctttcatcttctgcatcctcctgttttttagccaatggatgaaaaaaaatacagagaagacacatttgcttttatccactgcacttccactcactattagtcattgtggatacagctgagaatagcagttttctggcaggacagccacttctcagtaataaacaactgaaaaagtataaatgtgtcataaaaagctaatagattttaagaaaaacaagcataggcatcaataatgtttgtggtaaataaagattcatattgttgatttctattgagctcccgtaatatttgataaaagcttgcaaatatacagcagaaaaggagtattattctaaatcagaatattgttatggctattttgtcaatagaagtcaatatccaatatacagaatggttattttgtcaatgtaagtaaaaatatgacttcacactaatagtctcaccaatagttgtaatcaaatgctattttttatttaaaattttatttcatataagtaatcccaggcgggcggatcatgaggtcaagagatcgagaccatccttgccaacatggtgacagcccatccctactaaaaatacaaaaattagctaagcatggtggcacatgcctgtagtcccagctattcgggaggctgaggtaggagaaccactcgatcccgggagctgagatcacgccactgcactccagcctggggacagagcaagactccatctcaaaaaaaaaaaaaaaaaaggtctatatgtttgcagacagaccagatgttcaaagaaaactatataataaacatttactaataatttttcaggattcagaaatacatggattctatttctatttctttgtttttttttgaaatagagtcttgctctgttgcccagactggaatgcagtggcgtgatctcagctcactgcaacctccacctccggggttcaagcgattctctcctgcctcagcctccaggtgtgtgccaccatgtctggctaatttttgtgtttttagtagagctgggtgttggggttcaatcaggctggtgggaaaaatatttaaaagagtaacagtcaaaagctgtcctaaaaggcctgagagtttgcatagcttgattgcttggctgaaggcagccagggtctctttgcaggaggccaggaagattagggtgcaagtgaaaaggaatgtaggaagtttatcttactaacctgtttagttatatgggcttaagactaacttttgtcctgctgagggtactttactgccgcctactcgggggtccgcagtttattacccacaaatggtgtttgctttaggcctgggaacctggcctttaattttaccctctagtggtgtttactcacaacttttgttaattagtcttactgaataaatgcaagcctcactatctgatcagagccaagttgcaactgtttacagaactcaccttggagcctgtaagcggctcggaccctcagctggactggcagagcagaatgtgtgtcagtgtactttattcatccacagcgagtgcccccgcgaaaggagcgcttcctcagacggggtttcactatgttggccaggatggtcttgaactcctgacctcagacaatccacctgccttggaaagtgctgggattacaggcctgagccactgcacctggccatattttatttatttttctgtataatttttattatgaccataaaaataaacctgtagtcagtaacaatttaattgtacattttaaaataattaaaaatgtataattacactgtaattcaaaggataaatgctagaggtgatggatactttaccctaatgtaattactacatattgtaggcctgaatcaaaatatgccatataaggcataaagatatacacatactgtatacccacaaatactagtaatagatttcaataagaaaaaaaatttaagctatgggaacaattcaactcatttgcagtttaaagccactggcaaagtgacaagtagagatgttattccactacgtaccaaacagtatattgttaccatcttttaagtacacccttgattaaggtgggataggttaaagttagtggcataatggccaggtgcggtggctcacgcctgtaatcccagcactttgggaggccgaggtgggcggatcacaaggtcaggagattgaccatcccggctaacacagtgaaaccccatctctactaaaaatacaaaaaaattagccgggcatggtggcgggtgcctgtagtcccagctactcaggaagctgaggcaggagaatggtgtgaacctgggaggtggaggttgcagtgagccgagatcgtgccacagcactccagcctgggtgaaagaccgagactccatctcaaaaaaaaagaaaaaaagttagtggcataataatgcttcattaaacgcagaatagtcttaacatggtataaaaaatgaaattaagttcacacatcatctaacaatttttaaatatactgcattcgattacataaaagtacagttagtaaaataatattctcatttaatacttttaactgtaatttttctcactataatgtagaaaactattactctgaacccccactttttaaaaatctttattaataaagtaattcattataatttttgaaaaaaaaagttttaaaatggtctgccaacatgttaatgtaggttaggccatccaaaagacaaagcaaaacatcaacattaagtcataggctaggattatacaaatgagaacccccaccttatacattacttaatataagttaactacaaagagcctctccacttacatttttatcatgcatcttacattttaatgtccttattcttttatagaaaaggtcataatacccaataaaaaagaatctgtaatatccctgatgcagcaacaattgatcacatgctttcacatgtgaccacaataggaataaaataacagcgtaaagaaatttgaaagttgtattacatcattattcactgttcaaaaatttttttcaagaaacaagtacactttcaatgaaattacaatgcttcagaaaatctcccttttaaagttatatacaaaaacagctttagttgtggattcatttttatactcaatactctgatttagtgtaatgtctgaagtgtcagtgccttattctagtgtaaattctcatatttacgtaaaatcaattttgaattaaatatttttttcatatttacatctgcaaaaatatactttagtataaactctctgatgttttctaagctatagattttgaaaaaaaaagtctttccaaattcattatatttgcaggactcttctccaatataaattccatgttgttgaataaagctggagcaactgcttcaggttttcctctagtacacaatgtgtgcaacaagatctgtgatacaagtaaaggtactacaacccccccttatatttgtaatagctgatttcagaataaatattcttctttaaaggcttatattttctgaaagattttttgacagtaattgcacttttattgcttttattaactatgaaccttctgttgagatgtgagtgggcgttaatggcgtttccatattctttatatctgtacgatttttctcaaggataaaagctttcctgtgaaataaggtgtaagcactcaaaagttttgccacattcttcacacttgtaggagttttggcagcattaattctcttacctacaatcaagtgtggcaaccatataaacgctttgtctcatttcatacatttccagggtttcacattagtataatttatttttatgtatacaaaagttggaggtggtggtaaaagcactgttgcatctttcaggtttgtagagttcctcttcagcatgaattatcgccatgtctcttaagaattgagaacttgtggctgggcgtcgtggctcatgcctgtcatctcagcactttaggatgccgaggtgggtggaccatctgaggtcaggagttggagaccagtctggcaaacatgatgaaaccccatctctactaaaaatacaaaaattagctgggcatggtggtgggcaccagtaatcccagctactcgggaggctgaggcaggagaatggcttgataccaggaggcagaagttgcagtgagctgagatcgtgccattgcactccagcctgggtgacaagagtgaaactccatctcaaaaaacaaaaagagttgacaggttgttataggctttgccatattcttcacacttgtagggtttctgtccagtataaattatgtgtaataagggttgagaacttccttaaaaagctttgtcacattctttatatttgtagggtttatgttccatataaattctcatatttagtcagagtccagggctagttaaaggctttcccacattcatcacattcatacggtttctctccagtatgaattatcttatgcttattaagggttgaggaacatttaaaagattttccacattcttcactatgcagggtttctgtctaatatgaattttcttatgtttattaagggctgaggaccagttaaaagctttgccacattcttcacatttgtacggtttctctccagtatgaattatcttatgttcagttagagttgagaatgcagtaaaggctttgccacattcttcacacttgtagggtttctctccagtatgagctctcttatgtttagagaggcttgagtaccaggtaaaggttttgccacattcgtcacatttgtagggtacatctccagtatgaattctcttatgtttagtaaggtttgaggaacggttaaaagctttgccacattcctcacatttgtagggtttctctccagtatgaattatctcatgtttagtaagggttgaggatgaaataaaggctttgccacatttatcacacttgtatggtttctctccagtatgaattttcttatgtgaaaaaagggttgcagggtggttaaaagctttgccacattctctacatctgtagggtttctctccagtatgaattatcttatgtgtagtaaggttacaggactgcttataggctttgccacattcttcacatttgtagggtttctctccagtatgaattttcttatgtgtagtaaggtgtgaggactgcttataggctttaccacattcttcacatttatagcgtttctctccagcatcaattttcttatatgtagtacgggttgaagactggttaaaagttttcccatattctatacatttaaaagatttttttccagtatctcttatcttatgtttgtttgaatttgaaaatttatgcaagaatttcacatattcatcacattgaaatatttttctctgggtagttgccaaacattgtttaagtccattataacctcttttgtgcactggacactcatctacactttcacagcctttttttaactgtaaattgtcatgtctacatttttcatatcttcttagtatcactttttggaaagaatcttttatgctctgctctgaccaaaggtcttgggcaaaatgagaatacataactgaaagaaacaataaaaacacatgacttcaattgctagactcagataaatatacttcacaaatctaacctataaaattatacaaactacgtaagcaagatgacacagcaaaataccacaagctgtaatttcttcctggatatataactgtaacaaaaacatactgaccaaaatacatttgtaaaaaatttataaattagttaagtgtgtaaagggctccaggtgagcacaatgcaaagagccacatagaaaaatagaaaaaaagaaaagtctgttacttatacccaacacagctcttcctgctctccagtataacattgtgcctttaaaagtaaattgcgggcccggtgtggtagctcacacccgtgaccccagcactccgggaggctgaggcaggtggatcatgaggtcaacagttcaagaccagcctggcaaagatggtgaaaccccgtctctacaaaactacaaaacgttagccaggtgtggtaacagatacctgtaatccagttacttgggaggctgagggaggagaattgcttgaactgtggaggcagagattgtagtgagccaagatcatgccattgtactccagcctaggtaacagagtgagactctgtctcacacatgcacacaaatatgtaaattgccaacccctggtttcttttttaaaaaacaagaaaagtattggcacatacatctttatttctggattctaggggcttttttatttttattttttattttatttatttatttattttgaggtagagtctcgctctgtctcccaggctggagtgcagtggcgcaatctcggctcactgcaagctccgcctcccgggttcacgccattctcctgccacagcctcccaactagatgggactacaggtgcccgccaccatgcccggctaattttttgtatttttagtagagatggagtttcaccgtgttagccaggatagtctcaatctcctgacctcgtgatccgcccgcctcggcctaccaaagtgctgggattacaggcatgaaccaccgtgcccggcctctaggggctttttaaaatactggttaatgtctcccacgacatgaaatggtaatatacgttggaatgacactttgagtctaaaggtaaatgtttcagaagcaaagaaactgcagtatcccaaacacggaatgggtgtagcaagtgattactgatttattaagaagaaataagaataagccgatttaactaaacaacacaaaattttagacaagacacatcctaaaaatatgtttgagaaattccaagaatcgctatccaagacgattgattttcagactatgcgaggacagagctatattataaaaatcataacaggtagctttttgttcatgtccaaatctcaaagattacaatgtatacaaaatattagggcaacatggccccatcaaaaaaattataaaattttcaaaagcaacaataaaaagtgtataatttttaaaattccaaataaattgaacaggccaggcttggtggctcattcctgtaatcccaacacactgggaggccaaggtggggaaatcagatgaggtcaggagtttgagaccagcctggccaacatggtgaaaccctgtctctactaaaaatacaaaaaattagctagccgtgttgacaggcacctgtaatcccagctattcagggggctgaggcaggagtattgcttgaatgtgggaggcggaggttgcagtgagctgagattacgccactgcactccagggcgagactccgtctcaggaaaaaaaaaaaaaaaaaaacaaataaaataaatttaattttcacaaagtgaaacaggaacacagacaactactgaagattagaaaaacgaggataacaacgaaaaaatattaaaatagaaaacaaaaattgtgggtgtaaaaaatacaaaaactaagtgaaaaatttcttaaaagaaaaaattgtgtaaatagggcaaagctgaaaagctgaacaaacaaactaggatatacccaaacatctatttataacaaacacatatataaacaaaattccaaaaatcacagataagaagagaattttgggagctgcaagataaaaatgatggtcatttataagcatagtcttatgagataaccaataaattgatcaaaaacatttttgtaggtcaaaaggaaactgtgatattgttattaaagttataataaaaaaagatgtcaagtgggaatagtaccatcaccaaaattgtactaccaaataaaaagaagtccttccaaaataaccaaatcctgagaaagtatattggcactgcatatgccctacatatcaaggatgctgaaaggagtttttttccacagaaaataacataatgcaagaaaacaacacataatcatctgaagatatgtaagtttctggaaaagataggcacattcataaaaatggaatttcttacttaactaatgttaattagttatgttaatcataatggtacagtttaaaagataaaagtatggaaattatgaacatctgttaatgaatagacaacataaaaaatataattagtaaaatcaataacaaatgtgaaggtagatgtaataatgaggaatttctgtatgcaactgaagttaattttttactacattaaaatatattgttggatcttttagaggttttagataatcccccaaggtactactaagaaaatatccgaggccaggcacggtggctcacgcctgtaatcccagcactttgggaggccgaggcgggcggatcacaaggtcaggagatggagaccatcctggctaacacggtgaaaccccgtctctattaaaaatacaaaaaaaaaaaaattagccgggtgtagaggtgggcgccggtagttccagctactcgagaggctgaggcagaagaatggtgtgaacccgggaggcggagcttacagtgagccaagatcgcgccagggcactccagcctgggcgacagagcgagactccgtctcaaaaaaaaaaaaaaaaaaaaaagaaaatatccgtatagatacacaaaagaaaataagaaaaaagctcaaagcatgtcaacacaaaaataaaaaaaacttaaaaaggagaaattaagacacaaagatacaagaatcaaaacaattattttattaacagtaagtttttctctttcagaaaactatttaaatataattatctttccaatcaagagacatacttctaaaaaggctcattaaaaaattttaaaaatcaagactcaacttgcctttttacaagagtcagctgagatctaatgataagaaaagactgaaagtggcaagaccaagtagaaatttcatgtaaatactaacaaaatgagagcagaagaggtcaaaataatattacacaagctacattgttaaagtcaaaagctgtcatattttataaaatgtactttaagttaaaacttcaaaaaagaaggacattaaacaatatatagattaattcatggaaacctatgacaaatttgtttatccatgtgtgtatttgtgcgtgtgtgtgtctcaaattggggtttcaaatatataaagcaaatactaacaaagttgaatagagcaatataattatagtaggatatttcaataccccactttctgtaataataataaaacaagacagtatattagtaagggaacagaggactagaaggcagtaaaaaacaattatttctaatgaaggtatagagaacactcctcaacatcatcaggatacatagccttctcaatagctcataaaacattcctctttatagaccacctgttaggtcaaaaacaaagtcttaacacatttttttaaactaaaatttcatagattactttctatgacaaaaatggaattagagtataagacaataatataaataattgataaattttcaaatatatagaaatgatacaatacactcttgagcatgcacttgttgaaataaacttggctgggtgcggtggctcatgcctgttaccccagcactttgggaggccgaggcgggtgaatttaactccatctcaaaaacaatcaaaaaggaaataattaatattgtgaagatgtctataccgctcaatttaacctatagatttaatgcaatatttttcaaatttctcattgtatttttgaagaaataaaaacagcaaatccaaaactatatggaatctaaaaagacaaagtacccaacagtcttcaaaaaaaaaaaaaaatgttggaggcattacaatttctgatttcaaaacacatcaaaaagctacagaattaaaacaatttggtatgagcataaagatgaaaaagtagactaataaaacagaatgcagcacatgtattatatcacctttcacataattactgcagcattgctaccgaaagccaacaggtaaaagcaatgcaaatttctgtcaccaaatcagtagatataaaaatactggcatatcactcagttttcaaaaagaaaatattctaacaactattaagataaatattgatgacattatgcaaaataaaacgagccagccacaaaaagacagagactgtatgagatatataaagcagttatatgcttagaaaccgaagagtggtgttttaaaagtgctaggaaatgtgaagaattggtagttgtttaatgtgtattgagatttagctttgcaagataaaaatattctagtgatatgttgcataatatgtcaacataattaatataactaaacagaatatatatatatatatatatatttatatatattattttttttcgagatggagtctcactctgtctccgaggccggagtacagtggcaagatatcggctcactgcaatctccgcctcccaggttcaagcaattcccctgcgtcaccctcctgagtagctgggactacaggcatgcgccaccatacctggctaattttttgtattttagtagagacagggtttccccatgttggccaggatagtctccatctcctgacctcatgatccgcctgccttggcctcccgaagtgctgggactacaggtgtgagccactgcgcctggcctagaaatattttattataaattttcttatgtgtttttgacagataacacattttgttatgtgtttcccccacacaaaaataatatagattcataaataaatagatgttgaaattaggagaatttttatgactactcacgtagacaggattaaaaacctgtttcaggctgggagcggtggctcgcacctgtaatcccaacactaggggaggccgaggcaggcggatcacctgaggtcaggagtttgagaccagcctgaccaacatggtaaaaccccgtctctactaaaaatagaaaattagccaggtatggtggcgcatgcctatagtcccagctactcaggagggtgaggcaggagaatcacttgaacccggaaggtggaggttgcagtaagctaagattatgccattgtactccagcctgggcaacaagagcaaaactcccttttaaaaaaaataaaaaaagaaaagaaaacaaaacaaaacaaaaaaaacctggccgggtgccgtggctcacgcccataatcccagccctttgggaggccaaggcgggtggattgcctgaggtcaggagttcaagatcagcctgacaaacaaacatggtgaaaactcacctctactaaaaatacaaaaattagccaggcatggtggtgcacacctgtagttccagctactcagaaagctaaggcagaagaatcgcttgaacccaggaggtggaggttgcagtgagccaaaatcatgccactgcactccaacatgggcaacagaacgagaatccatctcaaaaaaaaaaaaagacgggcatggaggcttgagcctgtttaatcccagcactttgggaggctcaggagggtagatcacctgaggtcaagagtttgagatcagcatggccaacatggtgaaaccccatctcgactaaaaatacacaaattagccggctgtggtggcgggtgcttgtagtcccagctactcgggaggctgtggcagaagaatctcttgtacccaggaggcggaggttgcagtgagccgagatcgcaccactgcaatccagcctgggtgacagagtgagactctgtctcaaaaaaaaaagagaaacctactctgaaaaagcacactaatgtggaacttcaaaacaataataagagaaatgtttactcataaaatctggtatgcaacattgatgtatcatttaaacaaacattgttaggccagccaggcgcagtggctcacatctgtaatctcagcactatgggaggccgaggcgggcagatcacctgaggtcaggagttcaaagaccagcctgaccaacatggtgaaaccccatctctactaaaaacagaaaaattagccgcgcatggtgacacatgcctgtaattgcagctacttgggaggctgaggcatgagaactgcttgaagccaggaggtggaggttgaggtgagccaagatcgcaccactgcactccagtctgggtgacagagagtgactctatctcaaaaaaaaaaaaaaaaaaaattgtctacgtaactgcaatatttagctgttactgtgtactcattaaatgcaggtattttgaatcactggcatgcactgtgtggcagtaaaatttcagagaatatatgcagtgtaattatacacagaagattctgagaaatttttaataaataaccatttaaaagaaactagttactttttatgttttaaatatcttcttacacaaaatgaaattgctataatccaactttagaagaaaagaatagacatattgttaaataaaaaatatatatattttgcagaatagggttagaccctctgatatgtaaaacaagtattaggaaataaactacattattatttagatataggctgaagaaagttgatgaaaattctgtaattcccttttgcctgcagcaaacttgaatttacaagtaactattttagtaaatatggagtacctactaattatccaatttacttcaggcataccatgcaaattctagcacactgtcctaaatttctgaatctaaaattatgacaaatttgaaatagaaaacagaaagtaaaaatgtatagggagagtgacctcactaagatgaaaagattaaaagtcccctattttcatatcctcttacagcaaaaaaaggttagctatccctgacaaaaatgcctttatgagaaaaccaggcattatggctcacacctgtaatgacagcttcatggtacattaaggtaggagaactgcttcaggccaggattttgagaccagtctgcgttatgtagcaagaccccatctccaaaataagtgcctgtaagatttgagatccagggagggagttgtgaaatgctgttaaagcttaagattgagaagtgttctattcagaaggcaggccctcattcaggtgggaaactacaagacccctggttcttggctacagaccaggatagggttcacccaacttggtcccactgagaattctgaacttactctctaactatccgaaactcctcccggccacagtctggcagaggtcctgccattccagagacctggaggaaggtgcccatttacagccacgtaggcaggcctgcagaccttggcctttactgtggtccctggaacagttcaatgactcagtttcatttacctgtgccacagtttatggtcagttctgcctacatagaaacccacccagttacctgaggaaatgctctctggtacacagtgaaagccacactcatccacatcctgatacaacgcccaccatatgcagaaccgtgtgcaaaaacatgtcctaatgtctgccctatggagcaaagtcctgaaggatatgcagtctgtccaaaaataaaatgggaattacaactacccaagtccctgtatcaagccaactaaaggtgaaccctagtgcagacccagcagccttgtgaccaagctacaacccctcttcactacaaattcagagggaatctcatcacactaagggcccaataaaagattttttactttctaaaattagtttatgaaaacttgaagaggtgttttgttttctccatcaaattcagacaccaatacaaaactatattgcgcccattgtcagtgcttctattttaatctaggactggaagtatgtggcagaagaattaatgaaataaatatataaatccattgaaatagaaaaataagtaaaatgctgtttgtagatcatacaatcttatttttaaaaaaaccaaacacagtacttttacatttgctgaggtgtggtttacttccaactatattgtcaattttgtcaattttgtccattcaggacataggcatgggcaaggacttcatgactaaaacaccaaaagcaacaaaagccaaaatagacaaatgggatctaataaaactaaagagcttctgcacagcaaaagaaacaaccatcagaatgaacaggcaacctacagaatgggagaaaatttttgcaatctacccatctgacaaagggctaatatccagaatctacaaagaacttaaacaaatttacaagaaaaaaaacaaccccaccaaaaagtgggcaaaggatatgaacagacatttctcaaaagaagacatttatgcagccaacagacacatgaaaaaatgttcatcatcactggtcatcagagaaatgcaaatcaaaaccacaatgagataccatctcacatcagttagaatggcaatcattaaaaagtcaggaaacaacagatgctagagaggatgtggagaaacaggaacgcttttacactgttggcgggagtgtaaactagttcaaccattgtggaagacagtgtggcgattcttcaaggatctagaactagaaataccatttgatccagtgatcccattactgggtatatacccaaaggattataagtcatgctactataaagacacatgcacacgtatgtttattgcggcactactcacaatagcaaagacttggaaccaacccaaatgtccatcaatgacagactggattaagaaaatgtggcacatattcaccatggaatactatgcagccacaaaaaaggatgagttcatgtcctttgcagggacatggatgaagctggaaaccatcattctgagcaaactatcacaaggacagaaaaccaaacaccccatgttctcactcataggtgggaattgaacaatgagaacacctggacacagggcagggaacatcacacaccggggcctgtcatggggtggggggatgggggagggatagcattaggagagatacctaatgtaaatgacgagttaatgggtgcagcaaaccaacatggcacatgtatacctatgtaacaaacatgcatgatgtgcacatgtaccctagaacttaaaagtgtaattaaaaaaacccatacacagtacattaaaacctgtctaaaccaataaatacactaattaaattaggaaaatataaaattaacataaaagtatatctatggtttcatacagtttaactatctgataaaataaagaaaaaatcttatttactataacattaaataataaatttctgaggaaaaaattaaccaaggaggtaatacaaaaaaaaagaatgaaacaattggagaagatccaagtaaattttaaaatagtttatgtctatggattgaaagattaaatattactgaagtgccatattatccaaagtgatctacagattcaatgaacttcctattaaaattgcagtgtttttttttcacagtaatcaaaaatacaattctaaaatttacatgaaactaaaataaactttgactagccaaagcaatcatgaggaaaaagaacaaagcagaaggatatcatacttaaaatttcaaactatacatttcaagactatatagtaataaaacagaaaaatgaacaaaaaaatggaacagaaactaatactttcacacacacatttaagacctgatgcaaaaagagaacttaaagagttttagtttctcaaaatcatgcagatacttgtgtgtccccaaaacaatggaaaaacagccagattgtgcagtctcttatctgtcatgaagaggactttggctctcagtgtgaacttgaaggaagctcaccgaaagaaaaatagaattcttagagaattgaaaagcataagacagaagatgcctctttgtgagagcaaaattaaaagaaaaaagaaaagaaaagaaaaaaaaagctgcccaggaactatttccttgggaacacagcttcccaaatcacattttaaggactcgctttctctttgaccttgggacctctatctgtgttgtctgtcctattcattttcactcgcacctacctgggggtttggcaatcatctcatgcctcttcatagttaaaggtttttttccttgctccagacaggtgatcaggtttggtttagagacaacaatacctgttttattaagaataaataatatgaatcttgctcatattctccaattacaagctagtactgtgctcagcagagaggatgtgataaagtattctagtaaattaatactaaaatactaagttataacagaaattttttttcttttttgaggcagagtttcactcttgttgcccaggctggagtgcaatggctcgatcttggctcaccacaagctccaactccaggattcaagcggttctcctgtctcagcctcctgagtagctgggattacaggcatgtgccaccacgcccgactaatttttgcgtttttagtacagacagggtttcaccatgttggtcaggctggtctcgaactcctgacctcaggtgatccacccgcccggactcccaaagtgctgggattataggtgtgagccaccaagcctggcctataacagaaatttctaaatatttagaaaatactttcaatttgtaggtttcttaattttactactgggttctactaaatcaaaaattggtggtggcaattagattttcaggtgggggcaacaatattttatgccactaaatttttggaattaccactaatttggagtgaagaacacagctcaactcaggaatgtggaaagtttggattaagatgaaacatcatgaagaaattcttttctaaatgaaaaaattctgaagatttttctggaaaaaggagatctgaaactcttgtatgcaaagaataaattactaaaaaacattctacaaaaaagagaaataaaacctttagagtaatattatgaattatgtactcaagttatcctcaccaaggaagatcaggtttctgtagttctctaacatcacatccctatatagattccgctgtgcagcgtccaggcaatgccactcctccagagagaattctatggccacatctctaaattgcaatggtccctgaaaaaaacacacacacttatttttaccaagtggccatgggtggaatttttaatttgacttcaggtgaaatgagagagtaaagagaagtggttctgacttataggactaaaattatccaataaaatgattttcaacacagaaatattctctaatgtattctctaactctgagaagaaagagcagcacaagatccacaacatcagttcacatatgatatttttctagataataaagtataaaattacggccatgaacacgaacatgtacatttttgagtggtatatttacatcatacggaatgagcagtgaatatttttcagatagaaaagaaatgttgggttagaaggcacctctcaaattttaatatgtacaataagctgacgaccttgttatgcaggtttttttttccagaagatctgaaataaagtctttcttatttatttatttatttatagatggagtttcgctcttgttgcccaggctggagtgcaatggcgccatcttggcttactggaaacaccgcctcctgggtacaagcaattctcctgcctcagcctcccgagtagctgggattagtcatgcgccaccatgcccagctaatttttttttgtatttttagtagagatggggtttctccatgttggtcaggctgctcttgaactcccaacctcaggtgatccgctgcttcagcctcccaaagtgctgggattataggcgtgagccaccgcgcccggtcaattttttgaatttctaacaagctcaccagtaatgccaatgtttttggccccaaaaggatattttttcaaacatttagtaagtggaagagcctgtgttttcccccacattttctagcctataaacaaagagccctcatttatcaaagaaaatatgtaggaaaaaaataagaaaggacagctgccagattaaatgtgatggtttatgcacatcagctgcataaagatacttaataataaaaataactctatagtgaaaaaaatctctcagggagctacttaaccaagtgaatcattaaccactttttttttttttttttttttttttttttttttgagacggagtctcgctaggtcgcccaggccggagtgcagtggcgcgatctcggctcactgcaagctccgcctcccgggttcacaccattctcctgcctcagcctcccgagtagctgggactacaggcacccgccaccaggcccggctaattttttatatttttagtagagacggggtttcaccatgttagccaggatggtctcgatttcctgacctcgtgatccgcccgcctcggcctcccaaagtgctgggattacaggcgtgagccactctgcccagccaatcattaaccattaactgcactaggacaaatttttatgatatgctaatgctcacagaagaacacagcatcactgttgaaatactccccccaaaaaagtaaattatagtctgaatttaaccataaagaaacatcagttttaggccaggcgcagtgactcacgcctgtaatcccagcactttgggaggcacgaggtgggcggatcacgaggtcatgagttcgagaccagcctgactaacagggtgaaacctcatctctacaaaatacaaaaattagccgggcgtggtggcgggcacctgtaatcccagctacttgggaggctaaggcaggagaattgtttgaccccgggaggtgaagtttgcactgagccaagatcgcgctactatacccctggccttggtgacacagcgagactctgtctcaaaaaaaaaaaaaaaaaaaagaaacatgttttatgcaaactttaaaatacagattactcctctgttctgtaatttttagtagtaattttaagtaggcttcacttagctccctagagagcaggtatctcttaataatttttttcagaactttctgggtaataaatgccatctcatttaaataagcattttcttaatctcgttctgcatagagctaatagaacacacagatggagcctcaacattacatgttctccatctttactaaggaccagagttttacccaatagaaatcttgagtatccacatctttccatgttcaacagccacaaaggaaacatttttaatattgcagattataaattattgctgagaatcctgcatagcatataagaagctatgatgcagagaataaagagaaggctctgagatacaggaaagaaatatttttcagagacccttgactatcataagaattttaacaagtagttaaaccaaacttattagggcagaaaaacacaagtagagaagtaaagttttgtaagtactaaacacaaggcagtccaggaagcagagtggacacagctcttcatctgatgcatgtttacctgaaggggaagttattttttttcttcctccttcttctctggaattcattctcagatgagactctctgaataaattacatctgcatcttgagaatatgctttaaaggtgtcagtattacatgtttacctgatagcatgacatcaattggcagaaaaacaaaaggttaacccatttctgtcctttaaaacagaagagattcaggaacaatgagctgctccatgaaaataagaatgtttctcctttcctgtccccaggtgccctcccctgccacagacaccagcaatttctgctacagtaatggaaatatgtgccacactgacctgtccctaccaagtcaaaacagaataggccctgtgaccatcctttagtgcaaaggtggaacttaactctcatgaatgtattttgaagccctcatacctgattctggcctcaccttagagtcatatgaggcacttcattaaacaacatggatgcttccacacacaacaataaacagaagctgtggggagggcacaagagatttctgcaaattggccatgagatcctaatgagaagcctgggctgataaccactaagctaagcattgcctctcaagctttaacgagcttataaatcacttggtaattttggccccactttatgtagtgtgattttgcaggtttgaaaagggtccatgaatgggtgttttaaacaagttccctgtcaatgcggatgttgctcccccttagctcattattagcattagttacagaagcaggaacaacacagggtcccttacactcagcactcttgtcacaaccaaatacttctggtacagataaggacaacccatctccatcctaaagttttatattctttgctggttctttacagacaaaacagaaggcagcaatgtctgagtaagtcttgatttaaaaagcaacatgtacacatttactaatgcaatgtttattaagcaggtactatgtgctcaagagtatgatacagagcactatgctgggtattctcataacatcctgggagctggcactaagggtttaataatttccaggatgtagttaaaggtcccagcatttttatttcttctatttatcggtcatcaaaatttttttaaaaattgtatagaataaaagctaaatatagacagatggaagagatatagaaggaagagtttaatgtattatagagataattttattctattcatatttacttttttgtgacttatggagcaactactggatctgcaggaatagaaaacaagttgctaattagaatgtttctgcaagcattggttttaatacaacatttaaaaactaagaccctaaaatacatactttatttttctcatttatatgcttttgggtttcagaaaattgtgagcaccagctctagaaatgcagtaggatttaccagccaaaactctgatctcttctaatcagttctgtgaggcaagactccatggtagggtcagaactaaatagtctccaaaaagggtgaatctgaataggtctggggcagggtgaagacactatgtagaattctgttctctatgccactggggtacttccagttttgtttttcctaagcttacctaaaagaaatgtaaatccagagtttctgcaattttaatcttttctagccactgccctgtcaactttatactatatactaatatgcaatttaaacaaatcccttaaggtcttctagagtaactttttttgttttgagatgcagtctcactctgtcacctaggctggagtgcactggtgcgatctcggctcactgcaacctctgcctcccagattcaagtgaatcttctgcctcagcctcccaagtagctagaactacaggtgtgcatcaccatgcctggctaattttggtattattagtagagatggcatttcaccatattggccaggctagtctcaaactcctgacctcatgattcgcctgccttgacctctcaagtgctgggaatacaggcatgagccactgtgcctggcctttctagggtaattttattagaaaataaatacgtacacttaaagaaaaagaaatagaaattatactgctgggtgtagtgtctcacgcatgtaatcccagcactttggtaggccgaggtgggtggatcgcgaggtcaggagttcaagaccagcctgaccaagatggtgaaaccccatctctgctaaaaatacaaaaattagccggatgcgatggcaggcacatgtaatcccagctactcaggaggctgaggcagtaggctcacttgaatcagggtggcagaggttgcagtgagctgagattacaccattgcactccctctcaaaaatataaaaaaaaggaaattataataacggttcttctcttcataaatatgccttcagatgtagacatcagaagccacaacaatataaagtggcctaaataaagcccaagattttagacacattgtatttgttgtaccaaccatatgatgcacaattcaattatttatccagctgctagtctagactaaaagtttctggattgtaggaaccatgactgcttcatgtttttttttttttaaatggctatatgaaatggaagctactagtttatctatttgggtctccagatctcctccttgtttatcatccaagtaccaggaaactggagaaactctcatctgggtaccaaccaaagacatctcttgtatgaggggatgaacaaacacagatgactcatttctcttacactgagacagaagcagaattaactcctgtcagcctgacacaattctgcatgggacatctcaaatgcctcaaagacacctaggtgattttgaaggaattcccagtcaccctgggccgctggcccaatgataagccaggctggagagactcaggctgattctaaatagaaaatggaacttccctggtggaactccacaacctggatcacccattctgatttactagctcttgggtaagagaaagaacaaaaatactctactccagtatcacattttacaggtgaatatagttgtggttgtgatcatggctctggatactttgcagccttgatctctcactacagattatgccatcacattctatttcctcctggagcctctgacctcactgtagcaggtcaatgaacaagatgtgaaacatctcaaagagccacactcccaatgcagaaaatgccttttgttagttttctgtacattctctatccaaagtctggcccttttttatctgcagattctaggtaggatcaacttggctctgtatcctttggtgttacagtaagtggagtacaattaaaggagaaatcttaagaaaaagctcagattagatatgagattgatcaagtcagccagaaaatattcccctaaaagcaatttctctctcaacacccaaagtacacagctactctcagcatgagaaacatgaacattatggagaaagggggcagattttcagaatacttttataaagtttcttttccatctctgctgctctctcatctcctagccattgaataggggttctatatttaaatacatctgacaacttccaacaacactttttgatgaagaaatagaatctgactgtgttcatatagtggaatacattagagcttgcaatataactaactaaagagctatgttggtggtgtttgggtggccacatcacctgtctttatttgtcctgtaatagcagcattccaatttagtgaaataaaagatactaaaattgtgtttactcataattatccctattgaataaagtaataaacatgtcagactaatatctactataacaatttggtagtaaattttctttggatattagatataaatatctaagcattaataattttaatgaactagtcataatgtatgtagcatttttaaaaattgcaactatatttcaattaaaacttttacactttcaaaagtgtaaataatattaaaataaccatttaagtgaaaaggaatgcttatactctgctggtaggagtgtaaattagttcaacaactataaaaagcagtgtggtgattcctcagagaactaaaaacaattatcatttgacccaggaacctcataattgggtatatacccaaagaaatataaattatattataaagacacatccacatgcatgttcattgcagcactattcacaatagcaaagacacgcacaggctgtaaatgcctatcaatggtagactggataaagaaaatatggtatggtcagatgcagtggctcatgcctgtaatcccagcactttgggaggacaaggcatgtagactgcctgagcttagaagtttgagaccagcctggcaacatggcaaaatcttgtctccacagaaaatacaaagagaaaaactggccaggtgtggtaacgcccgcatgtagtcccagctacttgggaggatgagataggagagatttgcttgagcctgggaagttgaggctaaagtaatccaatatcatgccatggcactttagtctgggcaataagtgagaccctgtctccaaaaataaaataaaataaaataaaagatttagtaaaaacaaaatatggtacatcatggagtactctgtggccactaaaaaaaaagatcatgtcctttgcaataacactgatgaagctggagaccattattcttagaaaacaaatgcagaggctgcgtgtgattgcttatacctgtaatcccagcactgtgggaggccaaggggggtggatcacatgaggtgcggagtttgagaccagcctgaccaacatggagaaaccccgtatctactaaagatacaaaattatccggggttggtggcacgtgcctgtaattccagctactcgggagactgaggcaggagaattgcttgaacccaggaggtggaggttgcagtgagccgagatcacaccattgcacaccaccctgggcagcaagtgcaaaactccatctcaaaataataataataataataataataatgcagaaacagaaaaccaaatgcatgttattatttataagtaagagctaaataataacaacacatgaacacaaagaggagaacaaaagacactgaggcctagttgagggtggaggatggaaggactaagaggttcagaaaacatacctgtttggtgctatgggtagtatctcagtgacaaagtaatctgcacaccaaacctccatgacataattttagctgtgtaacaaacctacatgtgtaccctgaaccaaaaataaaggtaaaagaaaaaaaaaaatccctgggtgggagagagtgcaatgtaggtgagaggactgatttttggtacagatagtggtcccagtggggctgtactctatttatttccgtgtgcatgcaggcaggtgagattatgaacagctggtccaaaatgctaggatggtggagaaaacaggttgctgctgcagattcagtgtctgtgagtgggaatatgctaggagacttgtagagacttgtggattcttggcaagaaacactaggatcaaaaatgccattgtgggccgggcgctgtggctcatgcctgtaatcccagcactttggaaggctgaggcaggaggatcacgaggtcaggagatcgagaccatcctggctaacatggtgaaaccccatctctactaaaaatacaaaaaaaaattagccaggcgtggtggcgggcacctgtagtcccagctactcaggaggctgagacaggagaatggcgtgaacccgggaggcggagcctgcagtgagccgagatcgcgccactgcactccagcctgggcaacacagcgagactccatctcaaaaacaaaacaaaacaaaaacaaaaacaaaaaataccattgtgaggttcctgagggtggtgccgagtcccgggaggagtgtggacatgtcaatgtctagtgtgtgtgttcgtgagtgggtgggaatcctgtggtggcagctgtgggaaaagggggtctgtcatcagagcttctttcctctacattttcagtcctctgtcaccctgagagaagacctgggatcacaggacaacgggcagtgtgacagcctgtgtacgacagagcagagcctcccattcccaatcacccaaagttttattccaggccaggcctccgtggtatcttttttctggcaccatatctgtagagtctgctgaacatcaaacaattctccaacactaacttattgtctcacatttgaattctgacagcacccagagtcatcgtagaccctgattcagggctcagtcccgcaacattgtcctcatggcagatgccagtcacaaaccccaagggcccatctatgcttctgagctactgtttaaaacctggggagtcccataacctctctgaagttcaataatttggtagagctactcacagaatcatcaaaatactgtagttatctttactggtttaatatataagatgcagccctggaaaagccaaatggaagaaatgcacagaacaaagaaaagagatggggaaagatgaaacacatagataatcctggaaaatttttctgattaataaaattctccatcctttgtgtgctccaggaacagtttatggaaagaaacacccttcccattatgagttagatggtgctctcttttcttacctatcacacagccagacacacactctgcacattttctctttctcattaaaaaaaaatcagctgaatttgttttcagtggtcataatgaaatatttcttttcttttcttttctttttttttttgagccagagtctcactctgtcgcccaggctggagtgcagtggcactatcctggctcactgcaaccgctgcctcccaggttcaagccattctcctccctcagcttcccgagtcgctgggattacaggtgcccaccaccacacccagctaatttttgttttttcggtggtgtttttgagatggagtcttgctctgctgcccaggctgaagtgcagtggtgcgatctcagctcactgcaagctccatctcccgggttcacaccattctcctgcctcagcctccccagtagctgggactacaggcacctgccaccacgcctggctaatttttttgtatttgtagtagagacagggtttcaccctgttagccaggatggtctcgatctcctgacctcgtgattcacccgccttggcctcccaaagtgctgggattacaggcttgagccactgcgcctgacttgtgttttttaaaatagagacagggtttctccatgttgctcaggctggtcgcgtactcccaacctcaggtgatctgctcaactcggcctccacaggctgagtgctgggattacaggcgtgagccaccagcctggcctaaaataaaatatttcctttttttttttttttttttttttttttgaggggagttttgctcttgttgcccaggctggagtgcaacggcgccgtcttggctcactgcaacctccacctcccagtgggattacaggcatgtaagcctgcaacaggcagcaccacgcctgcctaattttttttgtatttttagtagagacagggtttcttcatattggtcaggctggtctgaaacccctgacctcaggtgatccacctgcctcggcttcccaacttgctgggattacatgtgtgagccaccacgcccagccaaataaaatatttcttaatcaaacttaagtttatctccctcccttgggctcctgaactttgagctaccctcagtctgagtcaacatacaaccccattttatgtccctcctaagaacatgctgatttcagtgtaaaacattctctgatctaagatctgactttttcaccctccatttgccattcccctcccacctcctttctaatcttgtttgcacctccctaggaaagaaagtgtttttctgcctacacctttgcaagccataaagatcttatagttagttggtatttcctctcgttgcaatacttttttagaattttttttacgtaaatctgattttttttttttttacaaagtctagaaagtacctcaaaacaataacaacttcatcatcagtaagactctctcagtttcctttcatcttaacctcaactgcatctgcctgtggatccccagctttccagggctctgtggcttctctcagaataaaggcttcttctatggctggggtgagcaggctgagacagctgcaggggtggctcctcagaaagaactaactgggcctttaataacttcctctcgcatgcttaacattagccttagcttggagtcactaggttcaagctttaatttccatgtcagagttattcacttggtttttgaaactgtttcaatagtcctgtgaaattactcaaacacagtgtttacgtaagggaaggaaattttaaggtgctttttttttttttttttgagacggtcttgctctgtcaccaggctgcaatgcaatggcccgatctcaggtcactgcaacctctgcctcccgggttcaagccactctcctgcctcagcctcccaagtagctgggactacaggcatgtgccaccacacctggctaatttttgtatttttagcagagacagggtttcaccatgttgagcaggctggtcttgaactcctgacctcaagtgatcaacccccctcggcctcccaaagtgctgggattacaggcatgagccaccacacctggctaaggtgcttgcattttataccttcataagaaaagcaaatatatctacttctttcagacaacgtattattttattatttatattaaaaacaatgtagtaaaaaattagtcatatgggaacacttctagaaggtaccacatttcatcacatataatttagcattaaactcagaaatcaagacaacaggaaatagaaccaagatattcactgtcacaaatttaccctgcaaaaagaggaactgatgttttgacgatctatataactcatcaattatctaccagattttcctgtggaaacattttcattgtctacagacaaaatggaagagagattttctctacttttttccttggtagctagcattcttaaagctaaggcttagaattctgtttgaaatcactcagccataaaaaacacatctgagaaaattcctgaactcactctgggaaagaaaaaggtaaatgagaattattaacaaatagaatgattagaaactaattttttaaaactcatctcttttatgtgctttgtaaatatttttttacctttcaagccctactaataaaatgcaaattacagttaaaacactgatgcagctgagtgcagtggctcatgtctgtaatcccagcacttcgggaggccaaagcaggtggatcgcttaagaacagaagtttgaagccagcctggtccatctctactaaaaacacaaaaactagccgggcgcagtggcgggcacctatagtcctagctattggggaggccgaggcatgagaatcacttgaacccaggagccaggggttgcagtgagctgagatcgagccactgcattccagcctgtgcaacagagactgtttcaaaacaaaacaaaaacaacaacagcacaaacacctgaggttaaaataagtgaacaaatcttttcaaggtacagatcctatcacccaccccatcctgttcaggtacatgctcaataactaccctcccaggagacaccgcgccatgccccagtgagtgccccacgtgcattttactttgttaagtttttacgccctctcactggggtcagttttttttgtcttttgaagtgttttttcactacttttctgctccccacccaagagaatccaggggtcagaaattatttgttttcccctcaataccagcatctgattgtctgaccagcaatgtgtctccaagaaatggaagctaggttgggtgaagaaaatcttcatgtctcaaggggttagcttttcaaaaaaaaaaaagaaaaaagtgcaccaggatctgcctttcaaccccaaggctgccacctgctcccttaagaggctacactccatacttcaggtagtcctatgggagaaaatgacccaagagctaacagtcactagacactctagcagacatagccatggtgggtatcttggtttatccccagaaagtactaaaacccaggaccagaaaaaaactgaaggttggctgaggacacatcaccctattaagtttccagagggtaatcttgacccaaaaacattcggtaagttctctggaaaaataaaagacaaagaggcacagatattttttacaatacagtgtcaggggattattctttgctttcttctcatgggaaatatttacaaacagaaaacaaatcttttcaatagtgttatgcaatactttttaaaaaatgactattggtcaggcgcagtggctcacgcctgtaatcccagcactttggaaggctgagacgggcggatcacgaggtcaagagatagagaccaccctggcaaacaaggtgaaaccctgtctctactaaaaatacaaaaattagctgggcgtggtggcacgcgcctgtactcccagctactcaggaggctgaggcaggagaatcgcttgaatccaagaggcggacgttgcagtgaggtgagatcgccccactgcactccagcatggcgacagagtgagactccatctcaaaaaaaaaaaaaagattgaggaacatggggtacacctgaggccctgcttgggacacatgtgaaaaacgccagggaaaatcagtcccctgtgggatgtgaaaataattaagtggcaggcaattagaatgaggaagctctagtccccagattcccacttctaaggaaaaaaaacaaaactcaagtgtattctttggtaaattactacattaggggaaacaaaattcaggcttaagcaactataaactgccaattaaactctgattacataaccaggaaatttccatctcgattgtacaaatttaaaaactacctaactaggctgggcgcggtggctcacgcctgtaatcccagcaatttgggaggctgaggcgggtggatcacaaggtcaggagatcgagaccatcctggctaacacggtgaaacccatctctactaaaaatacaaaaaattaggcgggcgtagtggcgggcgcctgtagtcccagctactggggaggctgaggcaggagaatggcgtgaacccaggaggcggagcttgcggtgagcggagatcgcgagactgcacgccaacctggcgacagagcgagactcaaataaataaataaataaataaaataaaataacaactacgtaactatacctaatcaattattgaatttggttttcttcatcatgcatttcataaatgtcttttcttcaagcccctcccatggactacaaacaacaaactgtagctgggtgctctacaattcttgaatcacactttcattaaattatttgatatttttgcggtgactcccccctccccgtttgtgtttttttaaggcagagtcttgctctgtcgcccaggctggagttcagtggcgcgatctcagctcacggcaacctccgcctactgggttcaacagattctcccacctctgcctccccagtagctgggactacagacatttgccatcacacacagctaacttttgtatttttagtagacatggggtttccccattttggccaggcttgtcttgaactcctgacctcaactgatcagcccgcctcgcctcccaacgtgctgggattacaggggtgacccaccacgcccggcccaataaatttttaataggagaaaagagaaactgtgaaccccacgaaccaaagctcttcccattcatgaacccgcaccccgagtcaggattctcccctgacgaccttcccgtggcccctgaacaatctgggaaagacctgtgggtgcagagctgcccggagagggttccacgccagggcacagtcactgcgcagggaaaagacaggacaccccggggacccgctgtcaacgcagccgccatgttatggctggggcggagctgggcaatgagaacttggagcgcagattgtggagctgactgccgggaggcctgagttctgccactgccacagccacagccacttcctccccagttccaaccagcccctctccctctctcgggatgtcgaactggcactctcaccatttctaggcttccagggggtcccggcgtcctagctgtgaccctcctaatacctgcaggtcacagggccacagaggctgggcctctaggagctgacggcacagagcagtgaagacgatagctggatctctggcgtcagcgagagacaatgggcccgccaaagccggaagccggaaaccgtcctgttcgctacagctgcgtggctgattggacggtttccagcccagcgtccctgattggataatgcttgaggccccgccccctcaggtcctgagttacagaagacgtgatccgatgctggactgagtgaagaaagagagacagtctaagctgcagccttttctttttttaaaaaaattttatttatttatttttttgagacggagtttcactcttgttgcccaggctggattgcaatggcgtcatcttgactcagtgcaacctctgcctcctgggttcgagcgattctcctgcctcagcctcccgggtatctgagattacaggcgcctgctaccatgcccggctaatttttttttgtagttttaatagagacggggtttcaccatattggccagcctggtctcaaactcctgtcctcaagttatccgcctgcctcggcctcccgaagtgctgggattacaagcttgagccaccaagcctggccagctgcagccttttcaaacaggacttcctccctgagctgagccaggcccaccccagagcatgggaaaattctctctctttttgactctctctctttttgaatatattcaaaaggtgaacggaagtattctgctgtcatattaataatacgtaaaatttttgttcaagagaaaatcaacttttactttggtaatagtgtattatcaattaaagctaattttaataaaaccttagaaataaatttgtcattttgaacactccagatttacatatatattttgtaatctcttgtaagttttttaactttttatattttatttttatccacattctttttatttttccatttgaaacaacctttaagtaatttcaaactgctatagggggtagaaagaaatcatttagggccaggcgcggtgggtcaagcctgtaatcccagcactttgggaggccaaggtgggcagatcacttgaggtcaggagttcaagactagcctggccaacatggtgaaaccccatctctactaaaaatacaaaaaattagcagggtgtgctggtgcacacatatagtccccgctactctggaggctgaggcaggagaatcacttgaacccaggaagtggaggttgtgtaacggcccaaggggttcaccttgccctttgcctagacagagccaattcatcaagacaggggaatttgtggaggaaaacttaaatattaaatttgaacttattgaacgtggacacaaacaatggtcaccaagtcttggaacaggttatgtgaaccccttgaggtgttcatcctgcgctgttttggagaaatctctatttcaatctattccaatacattggttattgaaaaacaatagacaatcacacacacacaaaaaaagttgacctttttgtgttctttgagcccaatcgcgaagggccctcatgactgggcctcatgccaaagaactcattacaaaaagagctagggtcccagatcacgcggaaccttcatgagacctctccttgtctgtgcagagatgggtggctgactctggagcccaggctgttgctttccagtctggtggtgaatcctcctagtctgatgagtgcggtatccgactctggagcccagcctgttgcttcctggtctggtggtgaatcctccatagtctggtgtggaggaaaagttaaatattaaatttgaactcaattgaacatggctacaaacaatggtcaccaagtcctggaacaagttgtgtgagctgcttgaggcattcatccagcgctgtattggagaaatctctatttcaatctattcctatacattagttgttgaaaaacaatagacaatcgcaaaagccagttgacttttgtgttccttgggtccagtcacgaatggccctcatgaatgggccttatgccaaataattcgttacaaaagagctagggtcccagaccgtgccaaagctccatgagagacctctcctcctctgtgcatgggcgagtgtccaactctggagcccaggctgttgcttcccactctggtggtaaatcctccatagtctggtgagtgtaaatatatatatgtctcttttctcctctccttttcctattgcaatttgcttattatatgaatcttcttcttatatcaatctgcttattgtatttatttgcttattatatcatttgcttattatatctgcattgccatttacgtgggataaagcttgtttacccttaaaggtattgtgtgtgtgtcttttcttctcaccttgagcctttccctcacagaacatttttggcattacaaacaggatttgaaaccaaaagtgtgcctctttttggccacaaggacagggctggaggctcggggacttcccataccctgggatgggaactcccccagttctcccccttggtgattgaatggtccaggggaactggactttgtgagaattgagaatctaaattagtgcaatttaaacctttgtgcatgaagtgctgcaggagattccagtcagcaaaaaagatgctgagggatctcccagagtggatggtgtttccttactgcttataagtttatgtgtcaagatacgggctggttgcaagaagagaaatgtaagttggaaaacgaatatgctaatctgacttccagactggccctggcccaatgccaggcctatgtcttgattgatcaggctcaaagctatcagcctattgctgaaaaaagcagctgtccaagtggcccggtcagggtgaaactgaagaactagtcagttggggcttggaacaggtaaaaacccagctcctatctcagaaatgggaaattaacctagtaaaattcaaggacccgcacaaactgtaaaattccatggcgttctatggaatgcagagatgtagtccatcttaccaaagactaaggctaaaatactagaatttacaacccctaccactaaaaaggaggcccagaaatttattggctttgtttggattctggagacatcatattccccacttgggtaacattttacaacctctgcatgcagactttcactggggagagacagagagcatggcttcttaacaagctaaacaagcagtgcaactggccctggatctatggcccatacgggatgggccagcagaactccaagtgactgtcctagatcaacatgctaattgaagcggtaggcagaaacaagatgggaagagggtacctttcaggttttggacccagaaactgccagaggccagaaaagcttatacccctttcaagaagcaattgttagcttgctattgggctttgctggaaacggaacacctctgtttcaaccatgaggtctttatgaggcctgaaatttctattatgacttgggtcatgagttccctcaaagctcaccagatagagcactctcaagaaagtagcatcataaaatggaaatagtacatacaagtccatttaagccaaaaccaaacggggtatcacttttacatgaggacgtacaaaacttcccagctcaggaaatcaccaagcaagccttgctgttagggaaggaaacctcccctgcccaatggggcaaatcctttaaagaactaagcccagaggatcagaaatatgcttggtttactgatggatccaccaaatacattggtgggacccgatgcttgaaggccgtggcttataatcctgttaaaaacataagtatttatgatgaaggaaggggtgggagcagccagttagctgaactagtagccatcctctgagctattcaagaggaggccagagggatttgtcacttgtataccaactcttggtctgtagcaaatgatcttactacctggataccccaatggtaacaaaacaaatggttaattgggaataaagaggtttggggaaaacaatactggggagatatctgaatcctttcgcacactaccattatcaccgttttccacgttgatgcccgtgcatctctgctttctcttgacagactatttaatcagcaagttatcaataacgccaaaatttccaccataactgcaaacttgaatggattacgtgtccaagcctttcaatgacaggcattgtaatgtatggtggtataattgatagtgattattggcctaaatgctactaatttagtggcctaaatgctccacttaaaagacacaaaatggcagaatggataagagtttaccaggctgggtgcagtggctcctgcctgtaatcccagcagtttgggaggctgaggtgggtgaatcacctgaggtcgggagtttgagaccagcctgaccaacatggagaaaccctgtctctactaaaaatacaaaatttagccagacgtggtcgtgcatgcctgtaatcccagctactcaggaggctgaggtagcagaatagcttgaacccaggaggcagaggttgcggtgagccgagatcatgccattgaactccagcctggacaatgagaattaaactccaactcaaaaaagaaaaaaaaaaaagattttacaggccaaatatctgctatcttcaagagactcacccaacacataaggactcacttaaacttaagggaaagggttggaaaaagatattccatgcaaatgtaccccaaaagctagcagtagtagccattcttacatcagacaaaacagatattaaagcaaaaacagttaaaaaaaaaaaagaaaagacaaagagggacattatataatgataaaaggactagtccaacaggaaaacatcacacctctaaatatatatgcaccttacactggagctcccaaatttataaaacaattactactagacctaagaaatgaaatagatgacaacacaataataatgagggacttcaatactctactgacagcagtagacaagtcatcaagacggaaagtcaacaacaacaacaaacaatggacttaaactatatcctagaacaaatggacttaaaatatatttacaaacattctatccaagaactgcagaatatacattttattcatcagcacttgaaacattttccaagatagacatatgataggccacaagtctcaataaatttaagacaatcaaaattatatcaactactctctcagactgcagtggaataaaagtgaaaatcaactccaaatgaaccatcaaaaccatgcaaatacacggaaattaaatttaaaaattaaagatcaacctgtttctgaatgagtgttggatgaaatcaagatggaaatttaaaaattctttgaactgaatgcactcgccatgtccatggagagaggctgaggcggccgagctccggctggaggtaccggagcgccaggacagcaaagatgtcggctgccttagtccgggcaaatgtctgggctgtgagcaagaggaaacttcagcccacctgggccgccctcaccctgacaccttcagcagtaaacaagataaaacaacttcttaaagataagcctgagcatgtaggtgtaaaagttggtgtgcgagccaggaggctgtaatggcctttcttatattctagaatatacaaagacaaaaggagattctggtgaagttattcaagatggagtcagagtattcattgaaaagaaagcaaagctaacacttttaggaacagagatggactatgttgaagaaaaattatccagtgagtttgtgttcaataacccaaacatcaaaggaacttgtggctgtggagaaagctttaatatttgaaatctcaggactcttctggccgtaggttccaggaaagctggtggaagccttggggctcactgcagaaatcatgtgactgtcacgtgtttaatatgctgctgccttgtaaggaaaataaagtgatgcattttgaaaatgaagccagtgtgttagattccagaagaaatgatatttgtattccctgtaggggacagaaaatgagaagccatcactctctttggatcatttaggtctcttacatcctttgttttagaaacagtttcattaaagttgccttcctgggcacctgtttatccatttcctggaccgtgtgcactccttagctctctactgaatggcttgaacatgcatccccctcagcatttctcccaaccagatcggcaactcctaaaatctgagataggacgtcctgactgctggtagtaacatggtggtgcattgttttttccaaccaaacttaacatagccttttagtacatttgtatgaaaatttttattttcagatgcctcattgcgtaccctttaatagtaccgggcaaagattttcttcaactatagtacagattagttctgagtgatggtatcaaaaggtgagaaagatgtcatccacctgttttttaatccatttcttttgccaccctatatgtctgctcagagatgggatctcaaggtgactttgattcttttagttgtggggtctcttaaagccatctagcccacctccctcaattccctatgtgaggaagcaaatccccagggaagccaaagtgctcctgtccacccccactccacaggccaagggagaatggggactctacccccatctccccttccttgtaggtgacacatgctctgccctctgaggcaatcagtgaaggcaaatggtctgatttctttatttggttgacattttgatagaatttctttataatttgatggagatcatagtattttattttgagtgggaagaattttaaaaccattttatgtgaattaccatcttgtttctttcacctttgaaacaatggtttgtagcagagaagacattgtagcaacccagaattatgcttttggaatgtggtcctcattgtgcaggagaacatggggatcttttcttaaaattctgtgtgcatacactttctgattcctcggtccagttgctaaagtttttaatattttagcctaatatttttatcatcaacctttctttaaaagtgttccttttgtcacgtagttactgattttcccgggtttgacatgttaagtattctatgaaatgacatatatgctttttttgaaagctgattctcatgaattcaagtagctgaggtcctttatgtttctttcattccctaaagtagctggcacaaaacacaccaaaacctagagcagtagttttatgtaaatgctcatgagtttgtatcaataatataattgttgatccacttataattcattcaatactgtatgtatctagagattgagttgtcaattaaaaaaaaaatgaggcctcaggctgggtgtggtggctcatgcctgtaattccagcacttagggaggccgaggtgggtggatcacctgaggtcagaagttcgagaccagcctggccaacatggtgaaaccctgtctactaaaaataaaaaaaaattagctgggcatgatagcaggtacctgtaatcccagctacttgggaggctgaggtaggagaattgcttgaacctgggaggtggaggttgcagtgagccgagatcttgccattgcactccagcctgggaaacaatgtgagactctatcaaaagaaaaaaaatgtggcctctttgtgatcataaaaaaaaaattatttgaaccgaacaataataatgacacaagctatcaaaatatctggtatatggcaaaagcggtgctaaaaggaatgttcatagcattaaatgcctacatcaaaaagtctgaaagagcttaagtagacaatgtaagataacacctcaaggaactagagaaacaagaacaagccaaacccaaacccagtagaagaaaagaaataacaaagatgagagcagaactaaatgaaactgaaacaacaacaacaataaaacagaagataaatgaaatgaaaagctggctcttagaaaagataaacaaaattgatagaccattaacagcattaaccaagaagagagaagatccaaacaagctcagttagacctgaaatggaagatattgcaactgatgccacagaaatacaaaagatcattgagggctactgtgaacacctttacatgcacaaattagaaaacctacagaagatgactaaattcctggaaatgtacaaccctcctagattaaaaaacaaaaacaactctgaacagactaataacaagcagtgagattgaaataataattaaaaaaaattgccaaccaaaaaagaagttcagaaccaggtggattcacagctgaattctatcagacattcagagaaaaactgatggggatggggccaagatggctgactagaagcagcatcccttagaaaagaatcataatagcatgtgaaacctgcaccgtcacctgaggtatccaggttctgtcatcagaactgactaggtggctggcatgaaccatggagaagaaggaagagcagtgtggggcaacagcccacctgacacccacatgggcctggggagcccccaccccccagccaagggaggcagtgagtgagcatcctacccagcctgggaaactgtgctttttccatggaacagtgcaacccatggatcagaagattccactcgtgaacccacgccaccggagcctaaggtaccaactgttggaaacaagagctcagagtcacaaagaaaacaagcactcaaacaaggaatttctcagcaaggcaaatttacttctacagaagggtgctgctcacatctctggttgttgtgagagcacactgtactagagagggaaggggttattattgctaacatagtccctacttctgtgtcctgtccccattggctggagtcagaccacataatataagctaactcgattggttattttaaatcgagactggcaggaaggttgtttacagagcaggtaactaggagtgaggaggacttcttccaaataaagaagagatgtgggttacagattgggactggtgggaagggttgtttacagagcaggtagcttggagcaggaacatacaaggaagttgatttggagaacaaagaacaaggaagttatcctttgaagagaaacttattatgcctgacacaaccctggagctaagcagatcctcaacagcctctcagctagaatctgcgtaagcctgccaagttcccaggggaggggcgaccagtaccacagctgtgtctggctgctgtctaagccctttgagctccttgggggagggacagcagccagcaatgggactcacaactgcctgacaggctaagctccctgggctcaggaagggcagcagccatctctatagctcctggccacacttttcccctgctagagccagggaggctggacagcttggtctcaagagatgtcccctacaacccaacactctggctgttgcagactgcagccagagtgtctcttcaggcctgaccctgaccatccctcctcactgggcagggcctcccagcaggaactccaacagctccagccaggggctcagaggcagaactctgatctccctgggcctgagcccctagggggaggggtgactgcagtctctgtggaccagcagacttagcctttcctcctgctagttctgaggaattcaggcagcccagatgagtgggcttcccctcaggaatcaccccacccctccaccgaaggatagtcaaagtgcttcattaaatgggttaggctccctgtgccacccaaatgggtgagacccttcaacaggggttgtcagacaccctatacaggagcgatcctatgggcatcaggttggtgcctcttgaggtcaaagattccagaggaaagagtaggcacctgtctttgctgttctccaacctccttgagtgacatctccaggcacgggagtaaaccagatgaatagggccggaagtgatcccccagcaaactgcagcagccctacagaagagggacctgaccattgaaagaaaaacaagcaaacggaaagcaacaacaacagcatcaacaacaaaaaagtacccacaaaaaccgtatccgaggccgggcatggtggctttcacctgtgaccccaagactttgggaggctgaggtgggcagatcgcttgaggccagagttcaagactagcctggccaacatggcgaaaccctgtctctactaaaaaatgcaaaaattagccaggcgtggtggtgcatgactgtagtgccagctacttgggagtctgagacatgagaatcacctgaacctgggaggtggaggttgcagtgagccgagatcatgccactgcactccagcctgggtaatagagcaagactctgtctaaaaaataaaaataaaaataaaataaaaataaaaataaaaaaccatccaaggatcagcagcctcaaagatcaaaactagacaaactcatgaagatgagaaagaatcaacaaaaaaatgctgaaaggccagagtgccttttctcctccaaatgatcaaaatgtctcttcagcaacgtgcagaactggacagaggatgagatggatgaattaacagaagtaggcagataataacaaagtctgctgagctaaaagaacatgttctaacccaattcaaagaagctaagaaccttgataaaaggttagaggaaatgctaactagaataaccagtttggagaagaacataaatgacctgatggagctgaaaaacacagcatgagaacttcatgaagcatacaaaagtatcaatagccgaatagaccaagcagaagaaaggatatcagagtttgaagaccaccttgccgaaataaggcttgcagagaagattaaagaaaaaagaataaaaaggaacaaacaaagcctctgagaaatatggtgttctgtgtggaaaatgcacagggggagaagaaaagacacacacacagtacctttaagggtaaacaagctttatcccatgtaaatggcaatgcagatacaataagcgaattgatatcataagcaaattgcagtgggaaggggagaagggaaaagagatgtgtatatatatatatatttacactcacgagactatggaggattcatcaccagatcaggaagcaacagcctgggctccagggtcagacaccagactcaccagactatggaggattcaccaacacactgggaagcaacagcctgggctctagagttggccacccattcatgcacagacaagcagaggtctcttgaagctttggtgcagtctgggaccctagctctttttgtaacaagttgtttggcatgaggcccagtcacgagggcccttcgtgactgggctcaaggaacacaaaaaggtcaacttgtttttgcgattgtctattatttttcaataactaacatatagaatagatggcaatagagatttttctgaaacagtgctggatgaacgcctcgaggggctcacacaacctgttctgggacttgatgaccattgtttgtgtccacgttcaacggagttcaaatttaatatttaactattccaccgcattcacaactccttctgtatattgtaaatatagcactcaaaaatgtgcatgttcgtattcatgactttaaatttctactttattatctagaaaaatatcataaataaactgatgtagtggatctcatgctgctctttcttctcggagttagagaatacattagagaatatttctatgttgaaaattattttattggataattttagtcagtcctataagccagaaccaattgtctttactctctaatttcaccttaagtcaaattaaaagtctcgcccatggccacttggtaaaaacgtgtgtgtgtgtgtgttttccagggaccattgcaatttagagacgtggccatagaattctctctggaggagtggcattgcctggacactgcacagtggaatttatatagggatgtgatgttagagaactacagacacctggtcttccttggtgaggataacttgaatgtataattcataatgtaccctaaaggttttatttctcctttttgtgaaatgttttttagtaatttattttttgcgtaaaagagtttcagatgccctttttccagaaaatttttagaatttgttcatttagaaaagaatttcaagatgtttaatcttttttttttttgagacagagtctcgctttgtcacccaggctggagtgtagtggcacgatctcagctcactgcaacctccgcctcccgggttcacgctattctcctgcctcagcctcccgagtagctgggactgttggcgtacgccgccacgcctggctaatttttttttttttttgtatttttagtagagatgaggtttcaccgtgttgtccaggatggtctcgatctcctgacctcgtgatctgcccgcctcagcctctcaaagtgctgggattacatgcgtgagccactgcgctcagccaagatgtttaatcttaatccaaaatctccacatgcctgagttgagctgtgttcttcactctaaattagcggtaagcccagaaatttagtggcataaaatattgttgtccgcacctgaaaatctaattgccaccatcaatttttgattcagtcacaccaggtagtaaaatttaaaaatctacaagcaaaaccgggtgcggtggctcaagcctgtaatcccagcactttgggaggccgaggcggacggatcacctgaggtcgggagtttgagacctgcctgaccaacatggagaaaccacatctctactaaaaatacaaaattagcagggcatggtggcgcacacctgtaatcccagctactccagaggctgagagaggagaatcctttgaacccaggaggcagagcttgcagtgagccaagatcgcaccactgcactccagcctgggcaacagagcaagactccatctcaaaaaataaataaataaataaaagcacaatattatactggacagcaggaagagctgtgttgggtataacagagctttctttttcttctatgtggctatttcattctgctcacgtggggaacttcacacatttaactcatttatacatttttttacacatgtattttggtcagtacgtttttgttacatttatgtgtccaggaagaaattagagctggtggtattttgctatgtcatcttgcttatgtagtttgtataattttataggttagatttgtaaagtatatttatttatctgagtctagcaattgaagtaatgtgattttactgtttctttctgttatgtgttctcattttgcccaagacctttggccagagcagagcataaaagattctttccaaaaagtgatacttagaagatatgaaaaatgtggatatgacaatttacagttaaaaaaaggctgtgaaagtgtggatgagcatgagctgctcaaaagaggtaataatggtcttcaccacagtctgacaactacccagagaaaaatatttcaatgtgataaatatgggacagtctttcagaaattttcaaattgaaacagacctaagatacgacatactggaaaaaaatctttcaaatgtatagtatgcggcaaagcttttaactcgtcctcaaaccttactacacataagaaaattcatactggagagaaaccctacagatgtgaagaatgtggcaaagccttcaaaaggtcctcacaccttactgtacataagatagttcatactggagagaaatcctacaaatgtgaagaatgcgggaaagcctttaagcacccctcacatgttactgcacataagaaaattcatactggagggaaaccctacaaatgtgaagaatgtggcaaagactttaagtacacttctacccttattgcacataagagaattcatactggagagaagccctacaaatgtgaagaatgtggcaaagacttttaagtgcacttctaaccttactacacataagagaattcatactggagagaagccctacaaatgtaaagaatgtggcaaagcttttcacctatcctcacaccttactacacataagatacttcatactggagagaagccctacaggtgtaaagaatgtggcaaagcttttaaccattccacaatccttttttcacacaaaaaaattcatactggagagaaattctacaaatgtgatgaatgtggcaaaacctttacctggccctcactactctctaaacacaggagaactcatactggagagaaaccctacaaatgtgaagtgtgtggcaaagcctttactgcatccttaactctaactgaacatcagagaattcatactggagagaaaccttacaaatgtgaagaatgtggcaaagcttttaactggtcctcataccttcataaacataagagaattcatattgcacagaaaccctacatagtgaagaatgtggcaaacattttaaatattcctccacttttaataagcataagataattcatactggagagaaactggatgaatgtgggaaagcctttaaccagccctcgactcttactaactatgagaatttatatggaacataaactcatacaaatataacaaatataaaaaatgtgacaaagctttttttaaaatttttttatttatttttttattatactttaagttttagggtacatgtgcacattgtgcaggttagttacatatgtatacatgtgccatgctggtgcgctgcacccactaactcgtcatctagcattaggtatatctcccaatgctatccctcccccctccccccaccccaccacagtccccagagtgtgatattccccttcctgtgtccatgtgatctcattgttcaattcccacctatgagaatatgcggtgtttggttttttgttcttgcgatagtttactgagaatgatgatttccagtttcatccatgtccctacaaaggacatgaactcatcattttttatggctgcatagtattccatggtgtatatgtgccacattttcttaatccagtctatcattgttggacatttgggtgacaaagcttttaaaggaagttctcaacctttattacacgtaattcatactggacagaaaccctacaagtgtgaagaatgtggcatggcctataagaagttctcaattccatttttttttttttttttgagatgaaatttcagtcttgtcacccaggctggagtacaatggcatgatcttggctcactgcaacctctacctcctgggttcaagccattctcctgtcttagcctcccaagtagctgggattacagttgcccaccaccacgtctggctaattttttgtatttctagtagagacggggtttcacaatgttggccagtctggtctcgaactcttgacctcaggtgatccacccaccttggcctcccaaagtcctagggttacaggcatgagccaccatgcctggctacaggttttcaattcttaagagacatggtgataattcatgctggagaggaaatctacaaacctgaaagatgtgacagtgctttttaccaacacctccaaatttcctatacataaaaataaattacactaatgtgaaaccctagaaatgtataaaatgtgacaaagcctttatatggttgtgacactgattgtaggtaagataattcatactggcaaaactcctacaagtgtgaagaatgtggtaaaacttttaatcagtgcttacaccgtatttcacaggaaagctattatccttgagaaaaattgtacaaatataaagaatatggaaaagccattaatgcccatcacatcttactcaacagaagaaagctcgtagttaataaaagcatgaaaagggcaattactgtcaaaaaatctttcagaaaatataagcctttagagtgaagaatatttattttgaagacagccattacaaatataaagtgggttgtagtgcctttacttgtgtcacagatcttattgaacacatttgtactagaagaaaaccctgaagcagttgctcaagctttgctcaacattggaatttatattggagaagagtcctgctaatgaatttggaaagccctttttttttttttcaaaaactgcagcttagaaaacaccagagagcttatactaaaatatatttttgcagatgcagtaaatataaaaaaatttaattcaaaattgattctatgtaaatatcagataatttacagcaaaataactaaggcactgacacttcagacattacactaaatcagagtgttgagtataaaaactaatccacagctacagctgttaaattatttgtatataactttaaaagtagtagatttttttttttttttttgagacggagtctcgctctgtcgcccaggctggagtgcagtggcgggatctcggctcactgcaagctccgcctcccgggttcacgccattctcctgcctcagcctcccaagtagctgggactacaggcgcccgccactacgcccggctaatttttcgtatttttagtagagacggggtttcaccgttttagccgggatggtctcgatctcctgacctcgtgatccgcccgcctcggcctcccaaagtgctgggattacaggcgtgagccgccgcgcccggcctaaaagtagtagatttttttgaagcattgtagttacattgaaagtatagttgtttccttgaaaaaacaattttgaaaagtgaataaatatgtaatatggttttcatattactttatgctgttatttctattgtgctcacatgtgaaagcatgtgatcaattgttgctgcatcagatatattagagattgtttactaattgggcattacttagaaccttttctataaaagagtaagaacatcaaaatctatgatggatgatgaaaatgtaagtggagcgcctttttgtagttaacttatactaagtaatgtataaggtgggggttcatgttctcatttgtattatcgtaccctataacttaatgttgacactttgctttgtcttttggatggcctaacctacattaacatgtatgcagaacatcttaaaacttttttttcaaaagttataatgaattactttattagtaacaaagattaaaaaaggtgggggttcagagtaatatttttctacattatagtgagataaaaattattatagttaaaagtattaaattagtatattattttactagttgtacttttatgtaataaaatgcagtacacttcaaaattgttagattttgaacttaattttatttttttaccatgttaagactattgtgcatttaatgaagcattattatgccacttaactttaacctatttaaccttactcaacagtgtaggtaaaagatggtagcaatatactatttggttcatagtggaataacatctctagtaatccctttgccagtggctttaaactgtaaatcagctgaagaatattttcccactggttaaatttttattcttttttcttattgaaattaattattagtattttggggtatatagtatgtgtatatatttattccttatatggcatattttgattcaggcatacaatatgtagtaattacattagggtaaataaggtatccatcacctctagcatttatcttttctgttacaaagagtgtaattaacacttttagtgtataatttagtgaggcaggtggattgcctgaggtcaggagttcaagagcagcctggccaacatgctgaaagcccgtgtctattaaaaattcagaaattaaccaggcatggtagtgcaagcctggaggctgaggcaggagagtcgcttgaatcccttaggtggaggttgcagtgagctgagatcatgccactgcactccggactggggaatagagcgagactccctctcaaaaaaaagtgaaagaaatataaataaaattcttacattcttagtcctgaaaaattattaataaacaattgttatttaattgtttttgaacatgtggtctctctgcctgcaaacatatacacttttagttttaatttacatatagttaaatatacacatattactctgaagataactttaggtgtaagaaaattattcagtgagtaagtgtgtttgtgtgagtatgagtttgtacatattttcagaagaaaagagcaattattggaacaaaatgaattattttaatagggtaactaataaaaaactaaacaccttgaaaatgctgaaagcaaatccacactttctgctttgtcttgaatttattaatgtaaaattttatggcttatgtctcagattctccccagaatctgcctattaaagcacaggcaattttgtctccagaaataacactcttgactacaacaataaaagccctcttcaaacaaaaaatcatttttaacacttattttaatgaaaatttaaccacaattgaataattggtatatttttattgttctgtgtgtgaatgtataaaacagtacataaagaagccagaaaaaaagatgttaatatttgtaatgaattaaactggaaagttattaattattatttgcaggtgatatctttgattatgtagataagaaaagcagcagaaagacttttaaaagtttattcaggtgggtaagcaatattctaagataataccctggattcccagtctgttgcacacctgcggtggaatactctcgagtgtaaaaatgtgactgtggtgggacatcactcatgaaattaggttacccatgtgttgactttgtgtttatcaaaatggagattatcctgactgtgctaaacttaatcagaggtgtttttaagagaaaaagacacattataggaaaacacccctgctggcctgaaagtgacttctataggtggaacatgttgtaagctgcttatggtggccacatggcaggaaacatgcttgtatattgtcatcatttctgcctcttgcatgttgttcccagtagggagaataagaggttcctatggcagatggaaaaaaggggaatctcattcatgcaagaaataatcacctctcatctgggatagcttaagagaaacaggagaccacaaaaagactacattaatgggaggaaaagggtaacctggctaaaagtgctcactggcattaaggaacaacatttagtaagctgtagtgaacgatcagcctctgggatactgatagtctaccaataaggttgaacttattctaattcagtcaacatctctgcaccattctggtgacccaggtttacactattcattacagaaatgccatgaaaaccagtgggtaatgtcctagaattgaacttacttcaaaaggcatacctttttgttttcacatttgaaaaacctcaaaaacagtgaatttataattaacttctaattatagaggattctactatactgtaatagattaaactgtaaagaacttaatatgaatatttcttgaatacataattagttgtgtagatagtttcttttagattaacatgaaaaaactattagagaaaacatttgaaatgagataaaattaatcaagaccacaacttttcagtgggttggcctaattgccatgcttttggagatggccagacgactaacaagaaacagacaagatttggctttgctcaatgattgttttgcaccttttgaaatctaacatcctggctaaagtattcaaagggaatattttatagatggcttctcagggtttccaaggcaatgaaagaaaaattttgataggcaggaaaatgcacactgtctacacacattgctcttctctgatttgctttaatactgaaaaattgaagattgtaaatgtcatctcaatttagagtaaattaacaaaagatttgtttttgaaaaaagcaaatgtataaaattaatgggtaacggatgccattagcttctaaaaactagtatgactaaattcagtaagtatctagccatgcaaatatcagcccaattaaatgaagaccctcataggtgcatgtggaaagcattgctgtgcagtgtggtgcctccactcagcattttcttctgcctcttcatagagaaaccagtttcccctgagtgactcacggtgcatactggggactgagaatgctgtgttcagagtgattactgaaaacgtggttaatacacttcttctatacgataataaaatgttataaatcttactctgcctcagaaaagcttttagtaaaagtttatagtactcaatttgggttaatggaaaatttcagtattccagataattcagacacttaaatgtcagtgaaatcccataaaacatatttgaataagataaagtcttctttgctgagaattttatattactggtaaatttagaaaaccagtactttaagccaattagcagtgtttgacatgtgagtcgcacccagacaagtgctcttcatgatcattgttaaagcagcaatagcaccacgtgctttcctgggacctgctgtcctgttttccacgatataaagtggagaaggcattgaaatggcaaaggagtgtgatataaattgaatacttatatgaaacaaaattttaaataaaaaatagcacttgaagttgtacaactataggtgagactattagtgtgaggtcatatttttacttatactgacaaaataaccacaatattcttatttagaataatattccttttctgctatatatttgctagtttttgataaaatactatgggagctcaatagaaatcaacaaaatgaatcttaattttaccagaagcattattgatgcatatgcttgttttttcttaagatccattagctttctatgaaagatttatacttttttttcagtgtcttatttattgcttagaagtggctctcctgccagaaaactgttattctcagctgtacccatgttgactagtagtgagtagaagcgaagtggataaaaagtaaatgtatcttctctgtatcttttttcatccattggctgaagaacagaaggatgaagaagatgaaagcaaatataatctctgaaagatcatgaagctctgttaaccagacaaaaatccccatagtggatgtgtgttaattttatttatttatttttattgtactgcctacttctatgagttgaatttttttttttttttgagatggagtcttgctctgttgcccaggctggaggggaggaatggcacgatcttggctcactgcaacctccaaatcccaggttcaagcggatctcctgcctcagtctgttgagtagctgggattacaggcacgcaccaccacccccagctaatttctgtatttttagagtagacacagggtttcaccaggttggtcaggccggtcttgaacttctcatttagtgatttgcctgcctcggcctcccaaagttctgggattataggtgtgagccactgcgctgggcaagtttaaattttttttttttacactttatatggaaataggattatgtgggctgggcccggtggctcatgcctgtaatcccaccaatttgggaggccgagatgggtggatcacttgaggtcaggagttcaagatcagcctggccaacatggtgaaaccccatctctactaaaaatatgaaaattagttggacgtggtggtaggagcctgtaatttcaggtactgaggcggctgaggcagaagaatcacatgaacccaggaggcggaggtttaagtgagctgagatggtgttactgcaccatcgcctgggcaatgagctaaactccgtctccaaaaaaataaataggatttttgtgtgtgtgtttttctgtgctggcttattttacttagcataatattttttaggttcatgaatgttgtagcaaataacaagactttcttatttctaagggctgaatagcatttaattgtgtacatataccacattttctttctccacctattgatggacacttaggttggttccataccttagctattgtgagtaatccacttccttccttctcttttgttttgtttttgatttgttttgagacgagtctcatctgtggcccaagctggagttcagtgtcgcgatcttggctcactgcaacctctgcctcgcaggttcaagccattttagtgcctcagcctttgcgcctggccaaaaatatattttaaataaggtacttatgaccgagcgtggtggctcacacctgtaatcccagcactttgggaggccaaggtgggcagatcatctgaggtcacgagttcgagaccagcctggccaatgtggtgaaaccccgtctctactaaaaaatacaaaaaaaattagctgggtatggtggcaggtgccttaatcctaagtacttgggaggcagaggcaggagaatcgtttgaaccccggaggcagaggttgcagtgagctgagataaagccattgcactcaaacctgggggacaagagtgagacttctttcaataaataaatacttagatataaactaacaaatcttgtagaaaaaaacgagaaaaagacatggcattggtcttggcaccatttccctagataccacattaaatgcatgaacaacaaataaaagtttaactacactagactttaaaatttctgcacatccaaacaaaattgaagagtgacaacgtcacttagaaaatgggtgaaaacattggcaaattacatgtgaaaaaagtgaatattcaaaatatataaacaactcttaaaactaaacaataaagttaaataacttgatttaaaaatggaggaacaaaattttcatcaaaaagatacccaaaaggacacacaaattgggcacatgggctcacgcctgtaatctcagcactctgggaggccgaggcgggtggatcacctgaggtcgggtgttctagaccagcccgaccaacatggagaaatgccgactatactaaacacaaaattagccgggcgtggtggcacatgcctgtaatctcagctattcaggaggctgaggcacgagaatcacttgaacccgggaggtgcaggttgcagtgagccaagatcgcaccactgcacttccagcctgggtgacagagtgtgaattcatctcaaaaaaaaaaaaaatttgttagataattgcaatatttaactgttactgtatactcatcaaatgcagatattttgaatcattgccatgaactgtgtggcagtaagatttcagagaatatgcagtataattataaataatattctaatgagaaacttttaataaataagcatttaaaagaaactagagttactttttatgttttaaatatatgctattcttacacaaaatggaactgctgtaatccaacttaagaagcaaagaacagccttacattgttaaatacagaaaatacatacatatatatatttggcagaatagggttagaccctctgatatgcaaaacaaatattaggaaataaactatggtattatttagatacaggctgaagaaagtagaagaaaatcctataattcctttttgcttgcagcaaacttaaatatataagtaactattttggtaagtgtggagtgcctcctaattatgtaatttactgtaggcatatcatacaaattctaggatattgtcctaaatatctgaatctaaaattacaaatttgaaatagaaaatagaaagtaaaaatatatagggagaaggacatcagtaagatgaaaagattaaaagtgccctgttttcatatcccattacagcaaaaaaaagtcagctatttctgacaaaaatgcctatattggccagccggggtggctgatgcctttaatcccagaaatttggagggtcgaggctggaagatcacgaggtcaggagtttgagaccagcccagccaacatggtgaagacccatttctaataaaatacaaaaaaattagccggttatggtgatgcacgcctgtaatcctagctatgcagaaggctgaggcaggagaattgcttgaacccagaaggtggaggttgcagtgagctgagatggccccactgcactccagcctgggtggcagagtgagactccatctcagagagagaaaaaaaaaagcctttattcgagaaccaggcattatggctcacacctgtaatgacagctacatggtacattaaggttggagaactgcttcaggccaggatttcgagaccagcctgggttatgtagcaacatgacatctccaaaataagtgtctgtaagagagatttgagatccagggagggagttctgaaacactgttaaagcttaagattgagaagagttctattcagaaggcaggccctcattcaagtgggaaactacaggtcctgcagatcttggcctttactggggtccccaaagcagttcaatgactcagcttcagttacctgagccacagtttatggccagttctgcctacatagaaatccacacagttacctgaggaaatggtctctggtactcagtgaaagccatacttacccacatcctgatacaaggcccaccgtatgcagacccgactgcaaaaacctgccctagggtctgccctactgagcaaagtcctgaaggatatgcagtctgtccaaaaataaaacgggaattacaacaacccaagtccctgtaacaagccgactaaaggtggaccctagtgcaggcccagcagccttgtcaccaagttacaccccctctccactaccaattcagagggcatctcctcaccctaagggcccaacaaaagaacaactttaccttctgaaatcaatttatgaaaacttgaaggggtgtttactccatcaaattcagacaccaagacaaaactagattttgcccattgtcaatggctctattttaatgtagcactggaagtatgtggcagaagaattagtcagagaaatttaaaaatgcatttaaattcaagaaaaataagtaaaagttgctgtttgtagatcatacaactatatatatatatatatatatatatatattttttttttttttttttttttttttttgagatggagttttgctcttgtagctcaggctggagtgaaatggcacgatgtcaactcaccacaacctctgcctaccgggattaagtgactgtctggcctcagcctctcgagtagctgggattacaggcatgtgccaccatacccagctaatttttgtatttttagtagagatgggggttttctccatgttggtcaggctggccttgaactcccgacctcaggtgattcacccacctcggcctcccaaagtgctgggattacaggtgtgagccactgcacccggcccatacaactttatatttgaaaaagcataaacagtatattaaaacctgtctaaactaataaatatactcagtaaattagccaaatataaaattaacataaaagtatatgtatggtttcatacacttaaactatctggtaaaatagaagaagaggctgggcagggtgactcatgcctgcaattccagcactttgggaggccgaggcgggtggatcatgtgaggtcaggagtttgagaccagcctggccaacatgctgaaaccttgtctctactaaaaattagctgggtgtggtggcaggcacctgcaatctcagctagtcaggaggctgaggcaagagaattgcttgaacccaggaggtggaggttgaagtgagcaacagtgcaagacatcatctcaaaagaaaaaaaaaaagaaaaaatagaggaaaaaaaatcttatttactatggcattaaataataaatttgtgagaaaaaattaaggaggtaaaaaaatccatacaataaaaaaagaaaaaaattagagaagatcacaataaattttaaattattttatgtgtattaattgaaagaataagtattgttaaagtgctatgttatccaaagtgatttatagattcattaaacttcctataaaaattgcagtggtatttttttcacaataatggaaaatacgattctaaaatttacatgaaactaaaataaactttgaatagccaaagcaaacttgaggtaaaagaacaaagcaggatatcatatttacaatttcaaactatatttcaagactatatagtaataaaaacagaatggactgtgcagaaaaatgtacaaaaaaaatgcaacgggatctactactctcacacatttcagtcccgatgcaaaaagagaacttaaaaaatagttttaatttctcgaaatcatgcagatatttgtgtgtcccaaaaacaatgaataataagccagtgcagtcttttacatgccattaagaggactttggctttcagtgtaaattgaaggaagctcacgtaaagaaaagtagaatccttaagagaatttaaaagtataagacagggctgggcgcagtggcgcatgcctgtaattccagcactttgggaggccaaggcgggccgattgcctgaggtcaggagtccgaggccagcctgagcaacatggagaaaccccttctgtaataaaaatacaaaattagccgggcgtgggggcgcaggcctgtaatcccagctactcggaaggctgaggcaggagaatcacttgaacccaggaaagggaggttgcggtgatctgagatcgtaccattgcactcctgcctgggcaacaagagtgaaactctgccttaaaaaagaaaaagcatagtcgggcgcggtggctcacgcctgtagtcccagaactttgggaggcggaggtgggcggatcacaccgtctggagttggagaccagcctggacaatatggtgaaaccccatctctactaaaactacaaaaattagcggggcatggggcggtctcctgtactcccagctactcgggaggctgaggcaggtaaattgcttgaacccgggaggtggaggttgcagtgagcagagattcagagattgcgccactgcactccagcctgggcgacagagcgagactcggtctcaaaaaaaaaaaaaaaaaaaaaaaaggcataagacagaagatgccctgtgtgagagcaaaatttaagaaaagaaaaaagaaaaactgcccagaaactatttcctttggagcacagcttcccaaatcacattttaaggactggctttctctttgaccttggcacctcttatctgtgttgtctgttgtattcattttcactcgcacctacctgggggtttggcaatcatctcatgtctcttcacagtgaaaggtttttttccctgctccagacaggtgatcaggtctggcttagagacaacaatacctcttttattaaaaataaataacaataatcttgctcatattctccaattacaagctagtactgtgctcagcagagaggatgtgataaaatattctagtaaattaataccaaaatactaagttataacagaaatttctaaatatttagaaaatactttcaatttgtaggtttcttaattttactacctggtactgctgaatcaaaaattgatggtggcaatgagattttcaggtgaggcaacaatattttatgtcgctaaatttctggaattaccactaatttagagtgaagaatacagctcatctcaggactgtggaaagtttagattaagataaaacctcttgaaaaaactattttctaaattaccaaattctgaaaattttctaaaaaaagaggatctgaaactctttttttttttttgagatggagttttgctttgttgcccaggctggagtgcagtggcacgatcacgactcactgcaacttccgtctcctgggttcaagcaattatttgcctcagctttttgagtagctggaattacaggcacccgccaccacacttagttagtttttttatttttagtagagacatggtttcaccatcttggccaggttggtcttgaactcctgatctcgtgattcacttgcctttgcttctcaaagtattgggattacaggtgtgagccaccacacctggccctgaaactcttttatgcaaagaataaattactaaaaacattctacaaaaaaagagaatgaattatgtattcaagttatcctcaccaaagaagaccaggtttctgtagttctttaacatgacatccatataaaaattctgctgtgcagtgtcccggcaatgccactcctccagagagaattctatggccacatctctaaattgcaatggtcccgaaaagacacacatacacacattttcaccaagtggccataggcagaatttttaatttgacttaaggtgaaatgagagagtaaggagaactggttctgacttataggactgactaaaattatccagtaaaataatttttcaacacagaaacatacattctctgatgtattctctaactctgagaaaatagatccacaacatcagttcatctatttttccatataataaagtataaaattaaggccataaacacgaacatgcatttttgagtgctgtatttttatcatacagaatgagttgtgaacatttttcagatggaaaagacatgttgagttagaaggcacatctcaagttttgttttgttttgttttgagacggagtttcaatctagttgcccaggctgaagtgcagtgatgtgatctcagctcactgcaacctctgcctcccaggttcaagtgattctcctgcctcagccttctaagtagctgggattataggcatgcaccaccacacctggataattttgtattttcagtaggatggggttttctctattttggccaggctggtctcgaactcctgaccttggatgatctgcccgcctcggcctcccaaagtgctgggattacaggcatgagccaccgggccaggccaattttttgaatttctaacaagctcaccagtaatgccaatattttgacccaagaaggatattttgtcaaacatgcagtaagtggaagagcttgtgtttttcccagtttttctagcctgtaaacaaagataggagccttcattttccaaagagaaatatgtagaaaaaaataagaaaaaaggacagccaccagattaaatgtgatgctttatgcacatcagctgcgtaaagatacttaatatgaagagaaaaataattacagtgaaaaaaatccatcagagagctatttcaccaagtgaatcattaaccattaactgcactaggacaaatttttatgatgtgctaatgcacacagaagaacacagcatcactgttgaaatattcctccccaaaaaagtaaattatagtctgaatttaaccataaagaaacatcagttttatgcaaacttcaaaccacagataactcctatgttctgtaattttaagtaggcttaatttagcaccctagaaaacaggtatctcctaattatttatttcagaattttctgggtaataaatgccatcccgttttaataagcatttatttattttttttgagacggagtctcactctgtcgcccaggctggagtacagtggcgcgatgtccgctcactgcaacctctgcctcccgggttcaagaaattctctgcctcagccttccaagtagttgggattacacatgcccgccaccacactcggataatttttgtatttttaatagagatggagtttcatcatcttggcaaggctggtcttgaactcctgaccttgtgatccacccgcctcagcctttcaaagtgctgggaatataggtgtgagccaccgcaccaggcctaaataagcattttcttaatcctgttcttcatagagctaatggaacacactgttggaacctcaacattacatgttctccatctttactaaggaccacagttttccccaatagaaatcttgagtatccacatctttccatgttcaacagccacaagggagcatttttaatattgcagatcataaatccttactgataattctgcatggcatataagaagttatgatgtagagaatgtagagaaggctctgggatataggaaagaaatatttttcagagacccttgactatcataagaattttaagaagtagttaaaccaaactcattagggagaaaaacagaagtagagaagcaaagttttctaagtactaaacacatggcagtccaggaggcagagtggacacagctcttcatctgacacatgtttacctgaagaaaagccatttttttctttctcctgcttctatggaattcattctcagatgagattctccacacaaattacacctgcatatggagaatatgcctttaaaggtgtcagtaccacatgtttacctgctagcatgacatcaaatggcagaaaaaagaatttcattcatttctgtcctttaaaacagaagagattcaggaacaatgagctgctccgtgaagttaaaaatataagttcctcctttcctgtcctgaggtgccctcccctgccacagacaccagcaatttctgctacagtaacggaaatatgcaccacactgacctgttcctaccaaacccaaacagaacaggccctgtgaccaccctttagtgcaaaggtggaacttaactctcatgaatgtatttggaagtcctcatacctgattctggccttaccttagagtcacatgaggcccttcattaaaacaacatggatccttccacccaggacaataaacagaagctgtggggagggcacaggacatttccgctaattggccatgtgatcctaatgagaagcctgggctgataaccactaagctaagcattgcctctcaagctttaatgagcttatatatcacttggtaattttggccctgctttatgtagtgtgattctggaggactgaaaagggtccatgaatgggtgttttaaacaagttccctgtcaatgctgatgttgttccccctgggctcattgttagcattagttagagaagcaggaacagcacagggttgcttacactcagcactcttgtcacaacctaatatttctggtacaaataaggacaatgcatgtccatcctaaagttttatattctttgctggctctttaaagtttacagagaaaacagaaggcagcaatgtctcaataattctgtatttaaagaacaacatgggtcgggctctgtggctcacacctgtaatttcagcactttgggaggccaaggcgggtagatcacaaagtcaagagatcgagcccatcctggccaacatggtgaaaccccgtctctactaaaaatacaaaaattagctgggcatggtggcgcgtgcctgtaatccagccactcgggaggctgaggcagaattgcttgaactcaggaggcggaggttgcagtgagctgagattgcaccactgcactgcagcctagggtgacagagtgagactccatctccaaaaaaaaaaacaaaaaaacaacatgtacacatgtactaatgcactatttattaggcaggtactatgtgctcaagagcatgatagaaagcactgtgctgggcctaacacgttatgtgatttaatcctcgaaacaccttgggagctggcactaagtgtttaataatttccaggatttagataaagggcccagcattttttcttcttctgtttctctgtcatcaaaatttttaaaaaactgtaaagagtaaaagctaaatataggcagatgaaggagacatagaaaggaagagtttaacatagtttaaattttattctgtttacgtttacttttttgtgacttgtggaataactactggatctgcaggaagagaaaacaagttgctaaatgactctgcacgcactggttttaatagagaatttataaaatatgaccctaaaatacacactttgtttttcctgtttatgtttttgtgttccaggaaattgtgaacaccacttctagaaaggcagcaggattcaccagccaaaactctgatctcttctaatcagttctgtgaggccagactccaaggtagagtcagacctaaataaggcctccaaaaaggataaatctgaacaggtctggggcagggcaaggcccctatgtagaattctgttctctataccattagggtacttccagttttgttttttctaagctaacctaaaagaaacttaaatcccagagtttctctaattttaatattttctagccactgtcctgtcaactttatactatatactaatatgcaatttaaacaaatcccttatggtttcctagggtaattttattaaaaaataaatacgtacacttaacaaagtaaaataaatagaaattatatggccggcactgtggctcatacctgtaatcccagcactttgggtggccaaggttggtggaacacgaggtcaggagttcaagaccagcctgaccaagatggtgaacccttgtctctactaaaaatataaaaattagttgggcgtggtggcaggcatctgtaatcccagctactcaggaggctgagacaggagtatcacttgaatctgaatggcagagcttgcggtgagtcgagattgtgccactgcactccagaatgggtgacagagtgagactttatctcaaaaattaaaaagtaattagaataacaattcctctgttcataaatatcccttatgtgtagatgtcagaaatcacaacaatataaaggaagtggcccaaataaagcttaagattttggacacatctatttattgtaccaaccatatgatgcataatccaattatttatctggttgctagtctagactaaaagcttctgggttgtaggaaccatgactacttcatggttttttttttaatggccatatgagatggaagcaactagtttatctattcgggtctccagatctcctccttgtttatcatccaagtaccaggaaactggataaactctcatctgggtaccaaccaaagacacctcttgtatgaggggaggaacaaacacagatgactcatttctcttacactgagacagaagcagaattaaccatttttgtcaacctgacacaattctgttctggacatcctcaaatgcctcaaagacacctaggttattgtgagattattagatatcattgggctgatggcccaatgataagccaggctgcagactcgggctgtttctaaatagaaaatggaactgcactggtggagctccagaacttggatcacccgttctgatttgctagctcttgggtaaaagaaagaacaaaaatactctactccagtatcacattttacaggtaaatatagttgtggtcatggctctggatactttgtggccttgatctctcactccaaagatgcttatttacacttacagattctgccatcagattctatttcctcctggaacctctcacatcactgtagcaggtcaatgaacaagatgtgaaacatctcacagagccacattcccaaatgggggctgtaagctgtctttgctgacatctcacaaggcagaaaatgccatttgttagttctctgtacattcacaatccaaagaccagcccttttttgtaaatcccaggcagaggccagaccttatctgcagattctaggtaggatccacctggctctgcatcctttggtgttacagcaagtggagtacaatccgaggagagatcccctcatagaggctcctctagcacattctaaatgataagtctacatgaaataaaaaaaaaaagctgacacaacatcaatataagtagacagtttatttgggtcaagctgaaggattataatctgggagcaaagattcaagttgtctggaatctacactttgattggcatcagttacaagaggatttgtaaagataacaagagaagaacagagtaggtagacacaaagttgtttgtcagaaatttttatgtatttagagaaatagcatttattattgattagatatatatagttatggtttaggatatgggatatagtgtccaacgtgtcattattagtttaatttatagctacttttggcaatcgtgaacagtttcaagagatgaatacatagttcaaaggagggagaaataactgcactttcattttcatgtctctgagtttgataaccaaaggacttgcattttttagataaaagttttttatttcccaaatctcaagacctaaattcaaaatttggagctgcagatttaggggctgaaggactggagcagcagcagatgttacctgaacatttgtgagcactttagcaagaggagaaaggggaacgtggagattctcatgtctctatgtctactaatgcacatgttactgtgattgggtttctgggctaaatagtttttgtatcagtttcaggcctgaagatacaagagtcattgatagaggtaaaatgattgattgttgccctgtgaagtttgtagaaatgtggtctagcctctctagaagtgactctagaggactatagataccaaataggaagagacacaattctgcctccatatttaggggacagcatgcattttgaagtgcaaatgtgagttgactggaagcctgagaggaaaagtcccctctagagtaaattctggttggcaccttatgtgtttttatcatgtctggtaattctagacagtgtttggaaatgattaaaagaaaaattttctccagccccagagaaactccacaaaagtagcacagaaagaaaatggttttattacacaattgaacttaattgtgacatgcatcatcatcagtctgcttaagggatcgcaaagacagaaagatggtcaccataattagttcacaaatagaagaatttccagcgccatgtcatacatagttcatcctatgaacagattgaagaggccatctgtgtatgctaattgcttatattcaatgacaaacttttcacatcttcataacaggaagtagtttagtagctttaatccaggtgccttctgaaggtaggctttcattgtgctacaaaaatggttgaatagggttctatctttttggctatttacattttagagcagtggctctgtactccctggcattgggttacagcactcctgcttgctttctcctggttactagtggcctctttttttttttttttttgagacggagtcttcctctgtcgcccaggctggagtgcagtggcgcaatctcagctcactccaagctccgcctcctgggttcatgccattctcctgcctcagcctcccgagtagctgggactacaggtgcctgccaccatgcctggcctggctaattttttgtatttttagtagagacggggtttcaccatattagccaggatggtctccatctcctgacctcgtgatccgcccgtcttggcctcccaaagtgctgggattacaggcgtgagccaccgcgcccagcctagtgtcctctcttgacctataacatctgccactgaggcacagcctggagcacagctcacattttatatgaaccccatttgccacagcagcactctagtgtcacatcagagagtgaggcctgagctgcaggaggagagcctgcaggcctcctgggtagaattacaccttcacaatcatgagaatgtgattagtgtttcagcctcagtttctacctatagtagggacatggaaaaaatactgctgaatttccagcataagtccagatagaaatagctctaaaagttctcgctatgaaagtccacctcatgtagacaccatcggatatgaatagggcttttgaaacagacacccaaagcattggagagaaaaacagatctccatctgagccagattattttgagagaaaaaagttcaaaagatcttaagaaaaagctcatattagatataagattgatcagccagaagatattcccctaaaagcaatttctctgtaaacactcaaagtgcacagctactctcagcatgagaaacatgagccttatgaaaaaaaagtgcagtttttcagaagaattttatagcctttttcccatctttgctggtctgtcatctcctagccattaaattggggttctatattgaaatacatctgacaactttcaacaacactttttgatgaagaaatagaaactgactgtgttcatatagtggaacatattagaactggcaacatcgttaactgcagagctattatggtttttgggtggccacatcacctgtctcctgtaataacagcattccaatttagtaaaataaaagatacacaaattgtgtttactcacaattttccctattgaataaagcaataaacttgtcactaatatctactgtaaaaatttggtagtaaattttctttggatattagatataaagatctaagtatgaataattttaatgaaccggtcataatgtattcagtatttttaaaaattgcaactacatagctgggcatggtggctcatgcccgtaatcccagcactttgggagtctgaggcaggcggatcaccggaggtcgtgagtttgagaccagcatgaccgacatggagaaaccctgtctctactaaaaatacaaaattagctaggccaggtgtggcacatgcctgcaatcccagctactcaggaggttgaggcaggagaatcccttgaacctgggaggcggaggttgcagtgagccgagatcgcgccattgcactccagcctgggcaacaagagcgaaactctgtttcaaaaaaaaaaaaattgccactacagttaggtgcagtgtctcacacctgtagtcccagcactctgttaggccgaagcatgtggatcaccaggtcaggagttcaacaccagcctggcaaatatggtgaaaccccgtctctactaaaaatacaaaaaaaattaccttggcgtggtgcagcgcgcctctcatcccagctacccgggaggctgaagcagaagaatcgcttgaagccaggaggcagaggttgctgtgagccaagatcaagccactgcactccagcctggctgaaaaagcaagactccgtctcaaaaaaaaaaaaaaagaaaaagaaaaaaaattgcaactatacttcagttaaaacactttatatttcaaaagtataaataaaataaccatttaagcgattaattcaaagtaagtattgtggcttaatattcataggattgtagaatacagtgtttatggctcatgcctgtaatcccagtactttggaagagtgaggcaggtggatcacctgaggtcaagatcaagctggccaacatggtgagaccccatctctactaaaaatacaaaaacctacccaggcttggtgttgcatgcttgtaatcccagctgcacgggaggctgaggcaggagaatcacttgaacccaggaggtagaggttgcagtgagctgagatcaagccactgcattccagcctatgcaacagagggagactgtctaaaaaaaaactgaggtcaaaataagtaaacaaatcttttcaaggtacagatccaatcacccaccccatcctgttcacttacatgcgcaataaccaccctcccaggagacactgcactatgccccagtgagtgccccaggtgcattttactttgtaagttatttatgccatctcactggggtcagttttttgtcttttggagtgttttttcactatttttctgcccctcccacaagataatccagaagacagaaattatttgttttcccctcaataccagcatctgattgactgaccagcaatgtgtctcctagaaatgaaagccaggttgagtgaagacaatcttcatgtctcaaggggttagcttttcaaaaaaaaaaaagtgcaccagaagatgcctttcagccccaaggctgccacctgctcccttgaaagtctacactccatgcttcaggtggtcctatgggagaaaatgacccaagagataatagtcactagacactctagcagacatagccatagtgggtatgttggtttattcccagaaagtactaaaacccaggaccagaaaaaaactgaaggttggctgaggacacatcatcctacaaagtttccaaagggtaatcttgacccaaaaacattccggtaagttctctggaaaaataaaagaaaaagaggcgccagacacggtggctcacacctgtaatcccagcactttggaacgcagaggcgggcggatcacgaggtcaagagatccaggccatcctggccaacatggtgaaacctctctagctgggcatggtggcacatgactgtagttccagctactcaggaggctgaggcaggataattgcttgaacccgggaggtggaggttgcagtgagcccagatcgcgcggctgcacaactgtaggacctcactccagtctggcaacagagcgaaaactctgtctcaaaaagcaaaacaaaaaaaagaaaaaagaaaaagacacaaatattttttacaatacagtgtcaggggattattctttgctttcttctcctgggaaatatttacaaacagaaaacaaatattttcaatagtgttatgccatgctttttaaagaatgattaattgaggaacatggggtacacttgaggccctgcttgggacacatgtgaaaaatgccagggaaaaatcagttccctgtgaggtgtgaaaataattaattgcactttttgttaaattactatattaagggaaataaaattcaagcttacacaactataaactgccaattaagctctgaatcataactaggacatttccacctcgattgtacaaaataagaaactacgtaactatacctaaccaacgattgaatatggttttcttcatcatgcaccttataaatgtctttccttcaagcccctaccatggaccataaagtacaaactatagctgggtgctcaacaattcttgaatcactctttaattaaattatttgatatttttgcggcgactctcatattttttttttttagacagagttttgctctgtcgcccaggctggagtgcagtggtaagatatcagcccctgcaacctctgcctcttgggttcaagcgattctgtcacctctgccttccaagtagctgggattacagacattcgccatcacacccagctaatttttgtatttttagtagagatggggtttcctcattttgaccaggctcgtcttcaactcctgacctcaagtgatccgcccgcctcggcctcccaaagtgctaggattccaggcgtgagccaccgcgcaagggcccatacatttttaataggagaaaagggaaactgtgaagaccaagcaccaaagctcttcccattcatgaacttgcatcctgagtcaggattctcccctgaggaccctcccgtggtccctgcacgatctgggagacacgtggcgctgtgggtgcagagctgcccggagagggctccaggccagggcacagtcactgcgaggggaagagacaggacgccggggggcccgggtgtgagcgcagcctccatcttacggctgaaagggactgaggccgagctgggcaaggagaacttggggcgcagattgcggagctgactgcggggaggcctgagtcccgccacagccacttcccaccggttccaaccagttcctcccctgctctcgtgatgtccgacggcactcaccatttctaggcttccaggaggtcctggcgtcttagctgtggatctcccaaaaccgtcaggtcacagggctgggcctccagcagcagaggacacagagtagtgaagatgagacctggagctccaggtgcagtgagagacaaaggccccgccaaactcggaagtcgacctgttcgctccagctgggtgtctgattggacggtttccagcccagtgtccctgattggataatgcttaaggcctcgccccttcaggacctagtgagagaagatgtgataagatgctgcgctgagcaatgaaagagtcacagcctaagctgcatctttttcaggcagggctttctcccagagctgagccaggcccaccccagagcatgggaaaattctatctcttttttgctctctctttttgaatgtattcgaaaggtgaacggaagtactttgctgttatattaataatacgtaaaatttttgttcaagagaaaatcaacttttactttggtaatagtgtattatcaatactaaagctaattttaataaaaccttataaacaaatcaaatttgtcatttttgacctttcgagatttgcatatatattttgtaatctcttgtaatttttaaactatttatattttacttatatctacattccttttattttttcaatttgaaacaacctttaagtaatttcaaactgctataggagatagaaagcatttagggacagggactgtggctcacgcctctaatcccagcactttgagaggccaaggtgggcagactacttgaggtcaggagttaaagaccagcctggccaatatggtgaaaccccatctctactaaaaatacaaaaatttagccgggcatgctggtgcacacctgtggtcccagctactacagaggccgaggcagaagaatcgcttgaacccaggaggcagaggttgtgtaaggcccaaggggttcaccttgccctttgcctagacagagctgattcatcaagacaggggaatttgtggaggaaaagttaaatattaaatttgaactcaattgaacgtggacacaaacaatgatcaccaagtccaggaagaggttgtgtgagacctttgatgcattcatccagtgctgttttggagaaatctctatttccatctattcctatactttacttattgaaaaacgatagacaatcacaaaaacaagttgacctttttgtgttccttgagcccagtcactaagggccctcgtgactgggctttatgccaaataaaagagctgggatcccagatggcgccgaagtttcatgagacctctcctcgtctgtgcgtggacgagtggccgactctgaagcccaggctgtggcttcctggtctggtggtgaatcctccacagtctggggagtgtggtgtctgactctggatcccagggctggaaactcaaggacttcctatatcccagttctcccccttgtcatgccccatctggtgagttttgggggaactcatgacccaagtcataataggaatttcaggcctcataaagacatcatggttgaagcagaggtgttctgtttccagcaaagccctataggaagctaacaattgcttctagaaagaggtataagctttgccggcctatgacagtttctgggtccaaaacctgaaatgtacctcttcccatcttgtttctgcctaacgctccaattagcatgttgatctaggacagttacttgcagttctactggcccatcccgtatggagcatagatccagggccagcagcaccacttgtttagcttgttcagaagccatgctctccttctttccccagtgaaagtcatagtgttttctagtggctgcatgcagaggttgtaaaatgttacccaagtggggaatatgatgtctccagaatccaaacaagacaatacatttctgagcctcctttttagcagcagggatttcaaattctagtattttagccttagcctttgataaaatggactatttcctcccattccataggatgcaaccagctcctatcttgacacattaacctataagcagtaagcaaacaccatccactctgggagatccctcagcatctgctttgctgactggaatcccctgcagcccttcatgcacagtcaaaagtttaaattgcactaatttagattcccaattctcacaaaggccagttcccctggaccattcaactgccaagggggagaagtgggggatttcccatctctggatatgggaagtccacgagcctctagccccgtccttgtggccaaaaagtggcacactttggttttcgaatcctgtttgtgacaccaaaaatattcgggtgggaaacacatgaggggagaaggaaagacacacacacaacacctttaatggtaaacaagtttattccacgtaagtggcaatgcagatataataagcaaatgatataataaacagatcaatataacaagcatattgatataagaaccacattgatataataagcaaattgcaatgggaagaggagaaaggaaaagatatatatatatatatatatatatatatttacactcactagagtatggaggtttcaccaccaaggtggtaagcaacagcctgggttccagagtcggccactcatttctgcacagatgaggacaggtctcatgaagctttggcgcagtctggtaccctcagttttttgtaacgagttgtttggcaggaggtccagtcacgagggccttccgcaactgggcacaaggaacacaaaaaggtcaacttgcttttgtgattgtctattgtttttcaataactaatgtatagaaatagattgaaatagagatatcactgaaacagctctgaatgaacaactcagaaggctcacacaacctgttccaggacttcgtgacaattgtttgtgtccacgtttaattgagttcaaatttaatatttaacttttcctccacaaattcccctgtcttgatgaatcatctctgtctaggcaaagggccaggtgaaccccttgggccttacacaacctccgcctcctgggttcaagcgattctcctgcctcagcctccgtggtagctgggactacagatgtgcaccagcacgccaggctaattttttttttttttttttttttttgagacggagcctcgctctatcgcccaggctggactgcagtggcgcaatctcggctcactgcaagctccacctcccgggttcacgccattctcctgcctcagcctcccgagtagctgggactacaggcgcccgccaccgcgcccgccaccgcgcccgcctaattttttgtatttttagtagagatggggtttcactgtgttggccaggctggtctttaactcctgacctcaagtattccactcaccttggcttcccaaagtgctgggattacaggcgtgagccaacgcacctgtccctaaatgatttctttctatctcctataacagtttgaaattacttaaaggttgtttcaaactgaaaaaataaaaagaatgtagatataaataaaatatagttaaaaaattacaggagattacaaattatatatgtaaatctcgagaggtcaaaaatgacaaattttgtttatttacaaggttttatttatgtatttattcatttttggagacgcagtctcactttgtcacccaggcttgagtgcagtggtgcgatcttggctcaccgcaacctctgcctcctgggttcaagccattctcctgcctcagcctcctgagtagctgggaccacaggtgcatgccaccacgcccgggtaattttttgtatttttagtagagacagagtttcaccgtgttagccaggatggtctcgatttcctgacccagtgatctgccctcctcagcctcccaaagtactgggattacaggcctgagccaccgcacctggctttacaaggtcttattaaaattagctttagtattgataatacactattaccaaagtaaaagttgactttctcttgaacaaacatttcatgtattattaatatgacagcaaagtacttctgttcaccttttgaatacattcaaaaagagagagaatatgagatagaattttcccatgctctgggatgggatgctcagctcagggaggaagccgtttgaaaaggctccagctaggctaggcgcggtggctcacgcttgtaatcccagcactttgggaggccgaggcgggcggatcacctgagatcgggagctcgagaccagcctgaccaacacggagaaaccctgtctctactaaaagtacaaaaaattagacgggcgtggtgaggcatgcctgtaatcccagctacatgggaggctgaggtaggagaatcgcttgaacccgggaggtgcaggttgcggtgagccaacatcgtgccattgcactctagcctgggcaacaagagggaaactccgtctcggtggggggaaaaaagaaagaaaagaaagaaagaaagaaagaaagaaaaagaaagaaagaaagaaaggaaagaaagaaagaaagaaagaaagaaagaaagaaagaaagaaagaaagaaagaaagaaagaaagaaagaaagaaagaaagaaagaaagaaagaaagaaagaaagaaagaaaaggctgcagcctaggctgtcactctttcttcactcagcccagtatctgatcacatctgtcactcagcggctggggaggcggggccttaggcattatccaatgagggacgctgggccggaaaccgtccaatcaggcacgcagctggagcgaaccacatggtttctgggggcctttgtttctcgctgcagcgggagctccaggtttatcctcagtgttctgtgtcctgtgcttatagaggcccgtcctctgtggccgtgtgacctgcaagtattgggagagccacagctaaaccccgggacccctggaagcctagaaatggtgagtgccgggtccaacgtcccgagagaggggagaggctgtttggaacggtgggaagtggctctggcgggactctgcttcctcacagtcagctccacaatctgccgccggagttctccctgcccagctcggcctcagtccccttcagccataagatggcggctgcggtgacatccggggcccggcacagtgattgtgccctggcctggagccctctttcagcagctctgcacccgcagcaccgcgtctctcccagatcatgcaaggaccacgggagggtcgtcaggggagaatcctgactcggttccctgcgggttcatgaatgggaagagctttggtccgtgaggttgttagaaacaagcgcttggtgccgcaaaacaacacaaaacaaaaaactacccagcacttagaaaatttcacaggaaggcatatttacttctgaagaagagtgctgctcgcgtccgacctgatcgcaagagcacacagaagaaaggaaggaaggttttttttttttttgaggcggagttttgctcttgtggcccaggctaaagtacaatggcgcgatctcggctcactgcaacctccgtctcccgggttcaagtgattctcctgcctcagcctcccgagtagctggggttacaggcatgcgtcaccacacccggctgattttgtatttttagtagacatgccgtttcaccatgttggtcaggctggttttgaactcccgaactcagttgatccgcccgcctcggcctcccagtttgaaaggggtttttaaccctaaacgccgttattgcctctgtgtccttcccccattggccggggtctgacctcacaatctaggctgacccgattggctactttccaaataaggaaggggttcgggtcgcagattggaacaggcggtttgggttgtttacggagcgggtgtctaggtacaaagaggtacaaaaaagttggtcctaagaacaaggaacaagaaagttaggcccttgaagaggaatctattatatctgtcagggttcacagtttcccttttctcctattaaaaatttatggggccgggcgcggtggctcacgcctgtaataacaacacttcaggaggtcgaggtggatggatcacttgaggtcaggagttgaagaccagcctggccaaaatggggaaaccccatctctactaaaagtacaaaaattagctgggtgtgatggcgaatgtctggttttctgtttctgcattagttttctgaaataatggtctacagctttattgatgttattgcaaaggacatgatcatttatttttaaatggccagagagtattccatgatatttatgtaccatattttgtttttactaaatcttttattttattttatttttggagacagagtgtcacttattgcccaggctagagtgctgtggagtgatgcagccttatttagcctcaacctccctggctcaagcaattctctcctacctcatcctttcacgtagcttgatctacacgctggtgttaccacgcctggccaatttttctctttgtattttctgtggagacaggattttgcaatgttgcccaggttggtcttaaacttctaagctcaggcaatccacctgcctcagcctcccagagtgctgggattacaggcatgagccaccgcatctgaccataccgtgttttctttatccagtctaccactgatagggcctgtccatgtctttgctattgtgaatagtgctgcaatgaacatacatatgaatgtatctttataatacaataatttatatttctttgggtatatacccaattatgaggtagagtataagcattcccttttctctgcaaccttgccagcatctgttattttttgactttttaaaaatagccattctgactggtgtgatgtggtatctcattgtggtttctcttaatttctctaatgattagtgatgagctttttttttttcatatgcttgctagccacatgtatatgttcttttgaaaagcatctattcatgtttttttggcctattttttaatgagattttttttttcttgtaaacttgtttaagttcttaataaattctggatattagacttttgtcagaggcaaagtttgcaaattttttttattctgtaggttgtctgtttactctgttaatagtttcctttgctgtgaagaagctctttagttcaaataggtcccattgtcaatttttgcttttgttgcaattgcttttggtagcttcatcatgaagtgtttgccagtttctgtgtctagaatggtacttcctaggttatcttgcaaggtttcttacaattttaagtttttcatttaagtctttaattaatcttgagttgattttgtatattgtgtaatgaaggggtccactttcagtcttctacatagtgctagctagttattccagcaccatttattaaatggagaattctttccacatttctcttatcagctttgccaaaaatctgatgatggtaggagggtggcattatttctgggctctctattctgttgcattggtcttgtgcactcatgaacttttttttataatatctttctctcttctgctttttcccccataagcattttttcaagtgcatacagtgtgtaaaattctgatgtccaagagttcaaaaactctttaaaaagttccaaaaaaggggattggggggctaggggagggacagcattaggagaaatacctagtgtaaataatggtttgatgggtgcagcaaaccttcatggcacgtgtatacctatgtaacaaacctgcacgttatgcacatgtaccccagaactttaaagtataataaataaataaaaagcttaaaaaatattttgatattctctcttttcttaaggaatttaggttatatgtagatgcttttctctgctttttttgaaatacatgtaaatcatatgaacagctaaataaaccctttgtcattttctcgggtccagattatctttatgtagtacttcagaattattgctttatttttgcttctgaaaagtttatttttttcatttttagtcctttaaattagacacagatttgtttagataaaagctcattttaagagcacacagaagcttagcagaaagataggattaaatttagcaatgcagaatgctaaagactaaaaggtattaagtttcttttacagaaacctgattatccaaggtaattatccaatatttgcaggctgaagtacttatactgcaaaagcaagaacagtgcataaacagtggagtctgtagttgtatcttgctttctatttattacttcagaacaattaggatagttatgtgtagggtttgtaggcaaactgcattaatataaattaaacattttttttttcgaggtgttttgctcttgttgtccaggatggtgtgcaatggtttgatctcggctcaggcaaactctgcctcccaggttcaagcaattttcctgtctcagctcccagtagctgggattacaggcatgcaccaccaggcccagctcattttgtatttttaatagagatgcggtttttccatgttgatcaggctggtcttgaactcctgacctcaggtgatctgcctgcctcagcctcccgaagtgatgggattacaggcatgagccaccatgcctggcctttttttttttttttttttttttttttaaaaaacagtcttactctgttgcccaggctggagtgcagtggtgtaatcttggctcactgcaatcactgccttctggtttcaagtaattctcctgcctcagcctcccgagtggctgggaatacaggcatgcaccaccatgtccggctacttttttgtatttttagtagagacaggatttcaccatgttggtcagactggtctcgaactcctgacctcaggtgatgcacctgcttcagcctccaaaagtgctggtattaccggtgtgagccaaaaacaatattttctacaatagtatgaacataaagccacaatacttactttgaatgattcacttaaatggttattttaatattgttatttatacttttgaaatataaagtgttttaactgaagtatagttgcagtttttaaaaatactacatacattgccgagtgcagtggctcacacctgtaattccaacactttgagaggctgaggcaggttaattacctgaggtcaggagttcgacaccagcctgacatggtgtaaccccatctctactaaaaataaaaaattagctgggtgtggtggcacgcgcctgtaatcccagctacttggcaggctgaggcaggagaatcgcttgttcctgggaggcagaagttgcagtgagctgagattgcaccatttcactccagcctgggtgacagaatgagattgtgtctcaaaaaaaaaaaaaaaagctacatatattatgacctgttcattaaaattattcatagttagatatttatatctaatgtccaaagaaaatttactaccaaattgttagagtagatattagtctgacatgtttattactttactcaataggaataattatgagtaaacacaattttattatcttttatttcactaagttggaatgctgctattacaggaaaaataaagacaggtgatgtggccacccaaacaccataatagctattcagttagctgtgttgcaagttgtaacatattccactatatgaacacagtcaaattctatttcttcatcttaaagtgttgttggaagttgtcagatgtatttcaatatagaacccccattcagtggctaggagatgagagagcagcagagatggaaaagaaactttataaaattcttctgaaaatctgccctctttcttcgtaatgctcatgtttctcatgatgagagcagctgtgtactttgggtggttagagagaaattgcttttaggggaacattttctggctcatttgatcaatctgatatctaacctgagcttttttaaaagatcttttttacatttttctctcaaaataatctggctcagatggagatctgtttttctctccaatgctttggatgtctgtttcagaagccctattactatcctatggtgtccaaatgaggtggactctcacagtgagaacttttggagctatctctatctggactcatgctggaaattcagcagtattttttccttgtcaccattacaagtagaaactgaggctgaaacactgctcacattcccatgattgtgaaggtgcaattctacccatgaggcctgcaggctctcctcctgcagctcaggcctcactctgatgtgacactggagtgctgctgtggcaaatggggttcatataaaatgtgagctgtgctctgaactgtgcctcagtggcagatggtagaggtcaagagaggaaggacactagcattcaggagaaagcaagcaggagtgctgtagcccagtgccagggagtacagagccactgctttaaaatgtaaatagccaaaaagatagaatgctactcagccatttttgtagcagagtgaaatcctgccttcagcagacacctggcttcaagctgctaaactacatcctgttatgaagatgtgaaaagtttgtcattgaatataagcaattaacatacacagatggcctcttcaatctccaggtgaatttaggatgaactatgtatgacatggtgctggaaattcttctaattgtagactaattatggtgaccatctttctgtctttggagcctcttaagcagattgacgatgatgcatatcacattcaagttcaattgtgtaataaaaccattttctttcttttgtcttattgtgaagattttctggggctggaggaaatttttcttttaattattgtttccaaacactgtctagaattaccagacatgatacaaacacataaagtgccatccaaaatttactctagaggggactttccctctctggcttccagtcagctcagagttgtgcagcaaagtgcatgctgtcccctaaatatgcaggcagaattgtgtctctgcctttttggcatctatagtcctctacagtcacttctagagaggctagatcacatttctaccaacttcactgggcagtgatcaatcgttttatctctcttagaatgactcttgcatcttcagacctgaaactgattcagacatcatggagctcacagaccgaatcagagtaacgtgtgcattgaatagatgtgtagacaagaatctccactttcccctttgtctttttgctaaaatccttacaaatgtgcaggtaacacctgctgctactccagccattcaggtcctaaatctgcagctccacattttgaatccaagtttttgagatttgggaaataaaaaacttttatctgacaaatgtaagtccttttgattatcaaactcagagagacgttgaaaataaagtgcagttatgtatttctcctccctttgaactatgtattcatctcttgaaactgttcactattgtcacaggtagctataaattaagctaatagtgccacattggacactatatcccataccctaaaccataactatatatatatatatatattattatatatatatatatataatcaagtttatttctgttaataaataaaaatatctgacaactttgtatcagcccactgtgtccctgttttgttgtctttaccaatcctcttataactgctgctaatcaaagtgtagattccaggcaacttgaatctttgctcccaggttataatccttaagcttgacccaaataaactgtctacttatattcatgttgtgtcagcttttttttctttcatgtagacttaccatttagaatgtgctagagcagcctctatgaggggatcttttctttgattgtattccacttgctgtaacaccaaaggatgcagagccaggtggatcctacctagaatctgcagataagttctggcctctaccacagatttacaaaaaagggccggactttggattgtgaacgtacagaaaactaacaaaaggcattttctgtattgtgagatgtcagcatagacatcctacagcccccatttgggaatgtggctctgtgagatttttcacatcttgttcattgacctgctacagttatgtcagaggctctaggaagaaatagaatctgatggcagaatctgtaagtgtaaataagcatcttaggagtgagagatcaaggccacaaagtatccagagccatgaccacaactatatttacctgtaaaatgggatactggagtagagtatttttgttctttctcttacccaaagagctagcaaatcagaacaggtgatccaggttctggagctccaccagtgcagttctgttttttatttagaatcagcccgagtctctccagcctggcttatcattgggccatcagccctgggacactgggaattctctcacagtctcctaggtgtatttgaggtatttgaggatgtccagagcagaattgtgtcaggctgaaaagtgtggttaattctgcttctgtctcagtgtaagagaaatgagtcatcctgtgtttgttcatcctctcatacaagaggtttctttggttggtaccaagatgagagtttctccagtttctggtgcttgaatgaaacaaggatgagatctggagacccaaatagataaagtatttccttacatctcatataaccattaaaaaaaatgaagcagtcatggttcctacaatccagaaacttttagtctagattagctactggataaataattgaattatgtgtcatatggttggtgcaataaatagatgtgtccaaaatcttgggctttatttagaccactttctttatattgttgtgacttgtgatgtctacacctgtagggatattcatgaacagaagaattgttattataattaatttttggttttttgagatagagtctctgtcgcccaggatggagtgcaatggcgggatctcagctaactgaaacctcggcctcccgggttcaagtgatactcctgtctcagcctccagagtgtccgggattacaggtgcccaccaccatgcccagctaattttttgtatttttagtagagatagggtttcaccatgatggtcaggctggtctttaactcctgacctcaggtggtctgcccgcctcggcctcccaaagtgctgggattacaggcaggagccaccgcgcccagccacatatttattttctaataaaattagcctaggaaggcctggtgcagtgcctcacacctgtaattttagcactttgggaggccgaagcgggcagatcacaaggtcaggcgttccaaaccagactggccattatggtgaaacgctgtctttactaaaaatacaaaaattagctaggcatggcggcacacgcttgtagtttcagctactcgggaggatgagtcaaaagaacagcttgaacctaggaggcggaggttgcagtgagccaagatcatgccagtgcgctccagcctgggcgacagagctccaaaaagaaaataaaaattaccctagaaaacctttggggatttgtttaaattgcatagtagtgtatagtataaagttgacagggcggtggctagaaaatataaaaattacagaaacaggccgggcgcagtggctcacgcctgtaatcccagcactttgggaggccgaggcaggtggatcacgaggtcaggagatcgagaccatcctggctaacacggtgaaaccccgtctctactaaaaatacaaaaaaattagccgggcgtggtggtgggcgcctgtagtcccagctacttgggaggctgaggcaggagaatggcgtgaacccgggaggcggagtttgcagttagccgagatcgcgccactgcactccagcctgggcgacagagagactccatctcaaacaaacaaacaaacaaattacagaaactctgagatttaagtttcttttagataagcttagaaaaaacaaaactggaagtaccctagtggcatagagaacagaattctacatagggttctcaccctatcctaggtctgttaagattcaccctttttggaggccttatttaggtctgcctctatcctggagtcttgcctcacagaactgatcagaagagatcagagttttggctggtgaatcctgctgcctttctagagctggtgcttagaatttactgaaactcaaaagcagataaatcagaaaaacaaagtatgtattagagggtgttagtttttaagttttctatgaatccagtgctaacagagacattctatttagcaacttggtttctattcctgcagatccagtagttgctcctcaagtcacaaaaaaagaagtaaatataaacagaataaaattttctctaaactacattaaactctttctttctttctttcttttttgagatggagtgtctctctgtcgcccaggctggagtgcagtggtggatctcggctcactgcaagctctgcctcctgggttcacgccattctcctgcctcagcctcccaagtagctggaactacgggcacccaccaccacgcccggctaattttttgtatttttagtagagacggggtttcaccgtgttagccaggatggtctcgatctcctgacctcgtgatccgcccgcctcggcctcccaaagtgctggaattacaggcgtgagccaccgcgcccagccattaaactctttctttctttatcttgaaatctgtctacatttagcttttattctatgtaatttttttaaaaagttgatgatggagaaacagaggaagaaataaaaatgctgggccctttatctaaatcctggaaattattaaacccttagtaccagcttccagggtattatgagaactaaatcacataatgtgttatgcccagcacagtgctctgtatcatattcttgagcacattgtacctcattaataaacattgcattagtacatgtgtacatgttgttttttaaatatagacttattcagacattgctgctttctgtttcttctgtaaactttaaagagccagcaaagaatataaaactttaggatggagttgggttgtctttatttgtaccagaagtatttggttgtgacaagagtgctgagtgtaagcgaccctgtgctgtgcctgcttctctaactaatgctaacaatgagcccagggggagcaacatcagcattgacagagaacttgtttaaaacacccatttatggacccttttcaaacctgcagaatcatattacataaagtggagtcaaaattatcaagtgatttataagctcattaaaactttacaggcagtgctctcattcatgagagttaagttccacctttgcactaaagggtggtcacagggcctgttctgtttgggtttggtagggataggtcagtgtggcacatatttccattactgtagcaaaaattgctggtgtctgtggcaggggagggcacctgaggacaggaaaggagaaacttatatttttatcttcatgaagcagctcattgttcctgaatctcttctgttttaaaggacagaaaagggtggactttttctgtgttttttttctttctgccatttgatgtcatgctagcaggtaaacaggtggtgctgacacttttaagggcatattatcaagatacgggtgtaatttgtacagagaatctcgtctgagaaggaattccagagaagcaagagagggaaaagtggcttttctgtttcagatcaagagctgtattcactctgcctcctcgaatgctatgcatttagtactcacaaacttttacttctctacttttgctttttttttaatgagtttggtttaagtacttcttaaaattcttatgatagtcaagagtctctgtaaaatatttattttctataccttagagccttctctacatttgctgcatcatagcttcttatatgccatgcaggattctcagcaagactttataatctgcaatattaaaaatgttcccttcgtggctgttgaacatggaaagacgtggatactcaagatttctattggggaaaactgtggtccttagtaaagatggagaacatgtaatgttgaggctccatctgtgtgttccattagctctatgcagaataggattagggaaatgcttatttaaaagggatggcagttattacccagaaagttctgaaagaaaattaaggtacctgctctctagggagctaaatgaagcctacttaaaattcctactaaaagttacagaacataggagttatctatattttgaagttagcataaaacatgtttctttatggttaaattcagattttatttactttctttgggaggaatatttcaacagtgatgctgtgttcttcttcttcttctttttttttttttaagaagagtttcactctcattgcccaggctggagtgcaatggtgcaatcttggctcactgcaacatctgcctcccaggttcaagcaattctcttgcctcagcctcctgagtagctgggattacaggcatgtgccacaacgcccagctaattttgtattatcaatagagacggggtttctccatgttggtcaggctggtctcgaactcccgacctcaggtgacccacccatctcggcctcccaaagtgctgaaattacaggcgtgagccaccatgcctggccgatgctgtgttcttctgtgtgaattagcacatcataaaaatttgtcctagtgcagttaagggttaatgattcacttggtgacatagctctctgacagatttttttttacaatagagttaattatttctctcttcattaagtatttttatgcagctgatgtgcataaaccatcacacttaatctggcgtctatcctttcttctcttttttgctacatatttttctttggaaaatgaaggctcttatctttgtttacaggccagaaaaactgggaaaaacacaggctcttccatttactcaatgtttgacaaaataccgttcttgggccaaaaacattcgcattagagatgagcttgtcagaaattcaaaaagtcagactttatgccagatcttccggaataaaaaaaaaccctgcacaacaaggtcttcagcttattgtgtatattaaaatttgagaggtgccttctaactcaacacatcttttgcatctgaaaaatattcacaactcattccatatgatgcaaatatagcactaaaaaatgttcatgttcatgcccttaattttatgctctattatctaaaaaatatcatatataaactgatgttatggatcttgtgccgctcttttttctcagagttagaggatacattagagaatatttttgggttgaaaaatattttattggataattttaggcagtcctttgagtcagaaccagttctctttactctctaatttcaccttaagtcaaattaaaaattcctctcatgccatttagtaattatgtgtgtgtgtgtgttttccagggaccattgcaatttagagatgtggccatagaattctctctggaggagtggcattgcctggacactgcacagcggaatttatatagggatgtgatgttagagaactacagaaacttggtcttccttggtgaggacaacttgaatatataattcataatataccctgaagattttatttctcttttttgtagaatgtttgttagtaatttattctttgcaaagtggtagaattacaggcataagccactgcgcctggccatattttatttatatttctgtataatttttattatgaccacaaagataaccctgtaatcaataacaatttaattgtacattcacaataactaaaagtgtataattacactgtttgtactacaaaggataaacgctagaggtgatggataccctatttaccctgatgtaattactacatattgtaggcctgaatcaaaatattccatataaggcataaatatatacatatactgtatgcccacaaatactagaataaatttcagtaagaacaaagaataaaaatttaaccgatgggaaaaatgttcttcaactcatttgcagtttaaagtcactggcaaagtgattactagacatgatattccactatgtaccaaatagtatattgctaccatgttttacctacatgcttgagtaaggtgggatatgtcaaagttggtagcataataatgcttcattaagcaaacaatagtcttaacatggtaaaaaaaaattaaataaaattaagttcacacataatctaataatatttaaatgtactgcattttattacataaaaatgcaattagtataatatacaaatttgatacttttaactataatttttctctttaatgtagaaaagtatttctctgaacccccaccttattttttatcattgtttattaataaagtaattcattatgtttttgaaaaaaagttttaaaatgttctgcgtacatgttaatgtaggctaggccatccaaaagacaaagcaaagcatcaacattaagtttgagaaatgagaacatgaacccctacctcatacattacttagtataagttaactacaaagagcctctccacttacattttcatcatgcatcttacattttaatgtccttactcttttatagaaaaagtcacaaataacgcccaataaaaaagaatctgtagtatctctgatgcagcaacaattgatcacatgctttcacttgtgaatacaataggaataaaataacagcataaagtaatctgaaaactgtattcactctaaattagtggtaactccagaaatttagtggcataaaatattgttgccccacctgaaaatctaattgctaccactaatttttgattcagtagtatcagatagtaaaataagaaacctacaaattgaaagtattttctaaatatttagaaatttctgttataaattattattttggtattgatttactggaatattttatcacatcctctctgctgagcacagtactagcttgtaatgggagtatatgagcaagattcatgttatttatttttaataaaacaggtattgttgtctctaagccagacctggttacctgtctggagcaaggaaaaaaacctttaactatggaaagacatgagatgattgccaaacccccaggtaggtacgagtgaaaacgaatacaacagatgacacagataaaaggtcccaatgtcaaagagaaaaccagtctttaaaatgtgattctggaagctgtgttccaaaggaaataggtcctgggcagctgtttttttttttttttttttctcccacaaaggggcatcttctgtcttatgcttttaaattctctaagaattctacttctcctttggtgagcttccttcaggttcacagtgagagccaaagtcctcttcatggcatgtaaaaggctgcgcgggctaggagtggtggctcacccctgtactcccagaacagtgggaggccaaggcaggtggatcacgggaggtcagaagttcgtgattagcctgaccaacatggtgaaactccgtttctactaaaaatacaaaaattagctgggcgtggtggtgggcacctgtaatcccagctacttgggaggctgagtcaggagaatcatttgaacctaggaggtggaggttgcagtgagccgagatcatgccatcgcactccagcctgggcaacagagcgagactccatctcacaaaaaaaaaaaaaagagagaatgagaggctgcacagtctggctgcttttccattgttttggggacacacaaatatctgcataattttgagaaactaaaactatttttttaagtcctctttttgcatcaggtctgaaatgcgtgagagtattagtttatcttgcattttttttgtttatttttctgcacagtccattctgtttttatttctataaagtcttcaaatatagattgaaattgtaagtatgatattcttctgctttgttccttttcctcaagactgttttggctattcaaagtttattttagtttcatgtaaattttagaattgaatttccattactgtgaaaaaaatactgcaattttgataggaagtgtattgaatctatagatcactttggataatatggcactttattaatatttattctttcaatccaaagacataaaatattttaaaatttatttggatcttccttttttatttattttttattgtaaaggttttttacatccctggttaatttttttctcagaaatttattatgtaatgctatagtaaataagatttttttctctattttatcagatagtttgttttaagtgtatgaaactgtagctgggcgcagtttaagtgtatggaaccatagctgggggtggtctcccaaagtactagatcacgcctgtaatcctagcactttgggagaccaaagtgcatggatcacctgagatcaggagttcgagaccagcctgaccaacatagagaaaccctgtctctgctgaaattacaaaaattcactgggcatggtggcgcatgcctgtaatcccagcaactcgttaggctgagatgggagaatcgcttaaacctggaaggcagaggtttcagtgagccgagatcaccccattgcacttcaggctgggcaaaagagctagactcctactcaaaaaaaaaaaaaaaaaagtgtatgaaaccatacatatacttatgtatgttaattttatgttttgctaatttactgactgtatttattagtttagacagggtttaatatactgtttatggttttttaaatatgtgattgtatgatctacagacagcaactttttacttactgtttttcaatttcaatggatttttttttatttctttgactaattcttctgccacatacttccagtgctacattaaaatagaagcatcggctgggctccctggctcacacctgtaatcccaacatgttgaaagggcaaggcaggtggatcacctgaggtcaggagttcgagacaagcctgaccaatatgatgaaacctcgtctttactaaaaatacaaaagttagccgggtgtggtgacatgcacctgtaatcccagctccttaggaggctgagacaggagaatcgcttgaatcagggaggcggaggttgcagtgagccaagatcacaccattgcactccagcctgggcaacaagagcgaaactccgtctcaataaaaaaaaaaaaaagaagaagaagaagcattgacaatgggcacaatatagttttgtattggtatctaaatttgatggagcaaacacctcttcaagttttcataaactgattttagaaggtaaagatcttcttttattgggcccttagggtgatgagatattctgtgaatttttagtgaagaggggttgtagcttggtcacaaggctgctgggtctacctttgggtccacctttagttggcttgctacaggggcttgggtagttgtaattccattttatttttagacagaccgaatatccttacaggttcaagcagttctcatgtctcagctttgcaaggagctgggattacagatgtgagtcacggtgtccggccttagtgtaggtttcttaacatcagtttattgtgtcttggttttaatttgtattacaattttagacaatttgcaattctgtttgtacactttaagtcaatttgaggtttaattaagagataaattgctggatgcggtggctcacgcctgtaatcccaacactttgggaggctgaggtgggtggatcaagaggtcaggagttgagaccagcctggccaacatagtgaaaccctgtttccactaaaaatacaaaaaattagctgggcatggtggcgggcacctgtaatcccagctacttgggaggctgaggtaggaaaattgcttgaacctgggaagcagaggttgcaatgagccgagattgcaccattgcactccagcccaggcaacagtgcgagactccgtctcaaaaaaaaaaaaaaagataaattatgcatgtttattacaatcagattacatatgtatgtgtgtttatctataaatatgaccccaattttagttatggcttatcttatattctttcttagctgattttccatggtagttttatcttaagtgagcagtcattgagatagttttattttttccatgtgtttaatgatgaatatatatttccttttgtgagaaaagcacttttgtgatttgaaggtaattttcaaaaggatttataattctgtatttttttctgtttttctttaaaacttgttttaaaaacacataacataaaatttaatgtcttaaatctattgaagtgtacatttcagggccaagtgtggttgtggctctcatctgtaatcccaggattttgcgaggccaaggcaggaggatccctggagcctaaaagtttgagagccgcctggggaatatatggagacctctctctataaaaaaaatttaataatagccaagcatggtggtgtgcacctgtggtcccagctacttgggagattgagagggattcaaaattgtgccactacattgcaggttgggggacagagtgagaccctgtctcaaaaaaaagttgttcatttcaggcatgttaagtatattcacactgttatgcaaaagacttctagaaactttacatcttataaagctaaaacttaattcccattaagtaacaactgctcattttaccctctctccagccctgacagacaaaccttcaactttctgttttatgatttttgactacttatgatacctcatatagctgggtgtggtggcttacacctgtaatcccatcactttgggaggctgaggcaggcagatcacctgagatcgggagtttgagaccagcctgaccaacatggaaaaaccctgtctgtactaaaatacaaaaaaattagccaggcatggtggcgcatgcctataatcccagctcctcgggaggctgagataggaaaatcgcttgaacctgggaggtggaggttgcagtgagccaagatcgggccattgcactccagcctggtcaacaagagtgaaactccatctcaaaaaaaaaaaaaaaaaagatacctcatataagtggaatcatatagtatccataattttgttactggtttaattcaggtgacataatattctcaatcttcatcttaaaatgtgacaagatggttatttttaaggtggaataatattccatcatatgtatatgttacattttttgatatgtttataaatcaagggacatctgggttgcttcagccttttgacttttgtgaatactggtacaataaacatatattttcaaatatgtcttccaggtcctgtgttacatattttgtttcttttgttgtttgttatttttatttttattttttttttgagatcgagtctcccgctgtcacccaggctggagtgtagtcgtgtgatctcagctcactgcaacctctgcctttggggttcaagcgattctcctacctcagcctcccaagttcctgggattacaggtgcacgtaacatcacccatctagtttttgtatttttagtagacatggtgtttcaccatggtggccaggctggttttgaacttctgacctcaggtgatctgcccaccttggcctcccagtgtgctatgattacaggcttgagccactacacttcgcctgtgttatgtattttagatatagatttataaataaggaacatttctaacattttaaaataatggctgcatcattattttccaccagcagtcaacatgggtttcatttttattgcatcatcaacagatttggtgtatcaaaaaaaaattatagtggccattctaatgggtatgaggtgattttgtttgttatgtttcttttttcatttctctacaaattagtaattttgtgtgtgctttcaaatgcattttccaattttgtgtatttttttgagaaaaatttgtccatttctaaatcaagttattcaaatttactgttagttttaagagtcatttatatattttgaatattaactcttttaacaagtaatatgtaaatgttttcaactattttctaagggacgttgtcactcctgaaatttttttctttcagaaattttgaagtatagtgtagttaaacttttttgttcttttatttgttgctcatacatttaatgtcgtacctaaaaaaatggtgccaagaccaatgtcatgtcttttttttgtattctttctttctttctttctttctttctttctttctttctttctttctttctttctttctttctttctttctttctctttcttttctttctttctttctttctttctttctttctttctttctttctttctttctttcttcctttcttttctttcttttctttcttttctttcttttctttctttcttttcttagatggagtcttgctctgtcccccaggctggagttcagtagcgcaatctcagctcactgcaagctctgccttctgggttcacgccattctcctgcctcagcctcccaagtagctgggactatgggcgcccgccaccatgcccggctaagttttttgtatttttaatagagacggggtttcaccatgttagccaggatggtctcgatctcctgacctcatgatccgtccgcctcggcctcccaaagtgctgggattacaggcatcagccaccgtgcccggcttgttttgtattttttctaaaatatttgttagtttattttgtctaagtattttatttaaaatgtatttttgtatcattcaaggaaataatccaactttattttatcagtgttgatactgtagcttttaactgttgtattgacatctttgaacaatgaaattttttgacccctgagcaagaatgttgaagtgtgttttatattcacatgcttttgaatttgccatttgacttttgcttttaattcctaatttcattcagtttttgttagaaaacacacagtgtataattttagtcttttaaaattgttttgttgttgttgttttgagacaagatcttaccgtcatccaggctggagtgcagtagcataattttggctcactgtagcctcagtctcctgggctcaagtgattctttcacatcagtttcctgagtagctaggattacagacatgcactaccatgtctggctaattgtgtgcttgtttgtagtgttaggatgtcaatgtgttgcccaggctggtttcaaacttttggccccaggggatcctgttttcttggtctcctaaaatgttaggattataggcaagagccactgttcccagtattttaaaatttaataaaacttgctctgtgtcctaacagaatacaccagatgcaaataagaatattgtgtattatcttggttttgactggagagttttgcatgtgtctgtgaagcctagttggtctataatatgggttggatattcatgttgtccaaacctcatgctgcaatataaatcctcaatgttggttatgggacctggtgggacacgtttggatcatggggcaaatttctcatgaatggcttggtatatcctcttggtaaccaaaaacttttcactctattaattcaaatgagagctggttcattaaaagaacctgggtccttcacctcacacttgctctgtctcttaccatataacatgtccagttactctttaccttccaccatgattttaagcttcctgaaatcctcaccagaagcagatgctggcacacacttcttatacagtctgccaaactgtgagccaaataaaccttttttctttataaattatgctactctcaagtattcctctatatgcaaaataattaatattgtctataatgttagctaagtttttttcttattttttatctgaattttatatttattactgcaaatggagtcttgatgtctacaattattatgttgccatgtatgtcttgcttcacttttgtcaatagttgctttatatattttggagccctgatgttatatacacacatttatatagatagataaatattacgattatagattcctgctaaatcaactcactttactataaaataataccagtctatgtctcatggtagtatttgacttaaggcatattatgtctaatataattatgaccacatcactcaattgtggttactattttcatggaatatacatttttttttcattttttattttcagcctatttgactcaatgcaaaatgagtctcttgtaggcagcgtactgtatgctttttaaaaaccactcaggcattctatttttttatatataattttatttatttatttattttcttttgtgatggaatttcactcttgttgctcaggctgaagtgctatggtgcgatctcagctcactgcaacctatgcttcccgggttcaagcaattttcctgcgtcagccttctgagtagctgggattaaaggcatctgctaccacacctggctaatttttttgtatttttactagtgacagggttccaccatgatggccgggctggttttgaatgcctgacctcaggtgatctatatattgtccttcttcgtctttttgaagttttgacttaaagtacattttataaaatatgacagtttttgactttaagatgtagcttgtgtaatattattttgacctcttctgctctcatttggttaatatttacatgaaatttctacttctgtcttgccactttcagtctttgtcattagatctcaggtgactcttgtagaaaggcaagttggatcttgatttttaattttttttttttttttttttttagaagaagtctcactctgccactcagactgcagtgcacttgttcaagtgattctcctgtctcagcctcctgagtagctgggattacaggcatgccccaccacgcctggctaatttttgtatttttagtagagatggggtttcaccatgttgatcaggctgataaaattttttaataaacctttttattgaaagtatgtttcttgactggaaagataattatatatatttaaatagttttccgaaagagaaaaacttactaatgttatctatttatttatttatttattttgagacggaatcttggtctatcactcaggctggagtgaaatggcacaatgttggctcactgcaacctctgcctctaaggttcaagtaattctcctgtctcagcctcctgagtagctggtattataggcacccaccaccatgctggctaatttttggtatttttagtagagatggggttactccatgttggccacgctggtcttggactcctgacctccagtgattcacccgccttggtctcccaatgtgctgggattacaggcgtgagcgactgcgcctggccaacgttattttattgttttatttgattcttttatctttgtctctttttctctttctgtctttttgtgttttttttttatttttgtattgatatgcttttaatttttttcttattttcttttgtgtatctaggcaggtagtttcttagtggtatctaggggattacataaaacctctaaaagatccaacaatatactttaatgcagtaaaaaattaacttcagttgcatgcaaacattcttcattacatctgccttcaactttgttattgattttgctaattctacttatgttatatattcattaacagatgtttataataattcctctacttccatcttttgcattttagagaataactaaaagtgctttctgtgccattatgataataagtaaggaattctatttttgtgtatgtgcatatcttctccagaaagttatgtattttcatatgatcatgtgttgttttcttgtattatgttattttcagtggaagaaacttctttcagcatctttgataggtagggcatatgcagtgccaatatactttcttaggatttggttattttggaaggactcctttttatatgatagtacaattttgccgatggtattattttctgcaaaaattttttttgataaattcactggttatcttataagactatgcttataaatgacacatcatttttatcttgcagcacccaaaattcttttcttatctgtgatttttgaaattttgcttataggtgtgtttgtgataaatatctttttgtgtatcctagtttgttcagcttcttcatgtttacattattttttcttttaagaaatttttaagttatttttatattttttatatccataatttttgtttttttctattttaatattttttcttgtttatcctcatttttctgatcttcagtagtcgtctgtgttcctatttcacttactgaatatcattcaatttcttttatgtaattaattaatttatttattttctgagacagagtctcactctgttgcccaggctagagtgcagtggcatgatcttggctcactgtaacctacccctcccaggttcaagtgagtctcctgcctcagcctcccagtagctgggattacaggtgcatgctgccacatttggctgatttttgtatttttagtagagataggctttcactctgttggccaggctgatcttgaactcctgacctcaaatgatccacccaccccagcctcccaaagtgctgggattacaggcatgagccactgttcctgtcctactttattttttttttgagacaggcttgctctgttgcccagcctggccagcagtggtacagtcactcactgcaagcttcccatcttgggttcaagcagttctcgtgtgtcagtctcctacgtggctgggattacaggcacatgccaccacgcccagctaatttttgtatttttagtagttacagggtttcaccatgttggccaggctggtctcaaactcctgacctcatgtgattttcctaccttggcttcccaatgtgttagaattacaggaatgagcttccaagcttggcctgttcaatttattctgaattttaaaaattactttattcactttttatggctgcttttgaaaattttataatttttttgatgggccatgctgcccaaatattttgtatacattgtaatctttgagtgagattcaggcattaacaaaaagctacctgtgccaatctttataatatagttttgtccttgtgtagtctgaaatcaattgttttggctagagattctgggaatttctcaaacatgtttttaggatgtgtcttgtctaaaattttgtgtttattgtttagttaaatcggcttattcatatttcttcctaataatcagtaatcacttgctacagccattcctgtttggattactgcagtttctctgcttctgtaacatttacctttagactcagcagactcaaactgtcattctaacatatcactgtttcagcattttatgtcatgggagacattagccggtgtctaaaaaagttcatagatgccagaaataaagatgtatgtgccaatatttttcttatttttaaaaaagaaaccaggagttggcaatttatatttgtgtgtgtgtgtgtgtgtgtgtgtgtgtgtgtgtgtgtgtgtgacagagtctcactctcttacctaggctggagtgcagtggcaaaaatcttagctcactacaatctccgtctccacagttgaagcaattctcctgcctcagccttcaggtagctaggattacaggtacctgttaccatgcctggctaattttctgtatttttagttgagatggggtttcaccatgttggtcaggctggtctcagtctcctcaccttaggtgatccacctgccttgccttaccaaagtgctggggttacaggcattagccatcatgcctggccaacaatttaatttttttttttttttttttttttttttgagatggcgtctcactctgttgcccaggctggagtgcagtggtgcaatcttggctcactgcagtctttgcctccctggttcaagcaattctctgccgcagccctccgagtagctgggattaaatgtgcccgccaccatgtctggctaattttttgtatttttagtagagacaaggtttcaccatcttggccaggctggtcttgaactcccgacctcatgatccacccacctcagcctcccaaagtgctgtgattacaggcgtgagccaccatgcccaactggcaatttacttttaaaagcacaatgttatactgggcagcaggaagagctgtgttgggtataactaacagagctttctttttcttctatgtggctatttgcattctgctcacctggagcccttcacacacttaactcatttataaattttttacaattttatttttgtcactatgtttttgttacatttatgtgtccaggaagaaatcagaactggtggtattttgctatgtcatcttgcttatgtagtttgtataattttataggttagatttgtaatgtatatttatctgagtctagcaattgaagtaatgtgtttttattgtttcttttagttatgagttctcattttgcccaagacctttggccagagaacatacaaaattctttccaaatagggatgctgagaagatatgaagaatgcagacatgacaatttacagttaaaaaaaggctgtaaaagcgtgggtgagcataaggtgcacaaaggaggttataatggacttaaccaatgtttgacaactacccagaaagaaatatttcaatgtgataaatatggaaaagtctttcataagttttcaaattcaaacacatataagacaagacatactggaataaatcttttcaaatgtataatatgtggcaaagcttttaaacggtcctcaacccttactacacataagaaaattcatactggagagaaaccttacagatgtgaagaatgtggcaaagcttttaaccaatctgcaaaccttactacacataagagaattcataccggagagaaaccctacagatgtgaagaatgtggcaaagcctttaagcagtcctcaaaccttactacacataagaaaattcatactggagagaaaccctacaaatgtgaagaatgtggcaaagccttcaaccgatccacagaccttactacacataagatagttcatactggagagaaaccctacaaatgtgaagaatgtggcaaagcctttaagcacccctcacacgttaccacacataagaaaattcatactagagggaaaccctacaactgtgaagaatgtggcaaatcctttaagcactgctctaaccttactatacataagagaattcatacaggagagaaaccctacaaatgtgaagaatgtggcaaagcctttcacctatcctcacaccttactacacataagatacttcatactggagagaaaccctacagatgtagagaatgtggcaaagcttttaaccattccacaacccttttttcacatgagaaaattcatactggagagaaaccctacaaatgtgatgaatgtggcaaaacctttacctggccctcaatcctctccaaacataaaagaactcatactggagagaaaccctacaaatgtgaagaatgtggcaaatcctttactgcatcctcaactctaactacacataagagaattcatactggagagaaaccttacaaatgtgaagaatgtggcaaagcttttaactggtcctcagaccttaataaacataagaaaattcatattgaacgaaaaccctacatagtgaagaatgtgacagatcttttaaatgttcctccacttttaattagcataagataattcatactggagagaaaccctatgaatgtgatgaatgtgggaaagcctttaaccagccctcgactcttagtaaatttgagagtttatatggaacacaaaccctacaaatataaagaatgtgacaaagctttttaaggaagttctcaacccttattacacataattcataccaaacagaagccctacaagtgtgaagaatgtggcaaaacctataaacctataacaagttctcaattcctttttttttgagatggagtttcactcttgtcaccgaggctggagtgcaatgacatgatctccgttcactgcaatctctgcctcctgggtttaagccattcttctgcctcagcctcccaagtagctgggattacaggtgcccaacaccacgcctggctaatttttggatttttagtagagatggggtttcacaatgttggccaggctggtctcgaactcctgacctcaggtgatccacctgccttggccttccaaagtgctggggttacaggcgtgagccaccatgcctggctacaagttcttaattcttaagagacaccatgcctggctacaagttcttaattcttaagagacatggcgataattcatgctgaagaggaaatctggaaacctgaaagatgcgacattgcttttaccaacacctccacatttcctatacataaaaataaattatactagtgtaataccctagaaatgtataaaatgtgacaaagcctttatatgattgtcatacatgattgtaggtgatagaagtcatactgccaaaactcctgtaagtgtgaagaatgtggcaaaatattttattagtgcttataccttatttcacaggaaagctcttatccttgagaaaaattgtgcaaatacaaagaatatggaaaaaccattaatgcctactcacatcttactgaacagaagaaggttcatagttaataaagcattaaaagtgcaattactgtcaaaaaatctttcagaaaatagaagtctttaaagtgaagaatatttattctgaagacagccattacaaatataaagggggttgtagtgcctttacttgtgtcacagatcttagtgcacacatgtagtactagaggaaaaccctgaagcagttgctcaagctttgtttcagggaatcaagggaatttatattgagaatagtactgcaaatgtaatgaatggaaagacttttcttttccaaaaatgacagcttagaaaacaccagagggtttataccaaaatatatttttgcagatgcagtaaatatcaaaaaatatttaattcaaaattgattctatgtaaatatcagagaattttccatagaataattaaggcactgacacttcagacattacactaaatcagaatgttcagtataaaaactaatccacagctacagctgttagataaattatttctatataattttttaaaaagtggatttttgaagcactgtaattacattgaaagtatacttgttttcttgaaaaaatttttttgaaaagtgaataatgatataatacagctttcacattgctttatgctattttattcctattatattcacatgtgaaagcatgtgatcaattgttgctgcattagagatattagagattgttttttattagttgggcattatgtatgaccttttctataaaagagtaaggacattaaaatgtaagatgcatgatgaaaatataagtggagaggctctttgtagttaactgatattaagtaatgtgtaaggtgggggttcatgttctcatttctataatcctagccaatgacttaatgttgatgctttgaatgtcttttggatggtctaacctacattaacatgtatgcggaacatcttaaaactttttttcaaaaatcataatgaattattttattaataagcaaagataaaaaataaggtggggtttcagagtaatgcttttctacattatagtgacagaaagaaattattaattatagttaaaaatattaaaatacagccaggtatatttattggtttagacaggttttaatataatatttatggttctttaaatataaagttgtatgggatgggtgcagtggctcatgcctgtaatcctagcactttgggaggctgaggcagatggatcacttgaggtcaggagatcgagaccagcctgaccaacactgagaaaccccacctctactaaaaatacaaaaattagctgggcatgatggcacatgcctgtaatcccagctattcaggaggctgaggcaagagaattgcttgaacgtgggagttctcagattacaggtgtgcgccaccatgcctggttaatttttgtatttttagtagagacggggtttcaccatgttggccaggctggtcccatactcctgacctgaagtgattcgcccacctcggcctcccaaagtgctgggattacaggcataagccaccgcaccctgcctatttttttcttactgaaatttattattagtatttgtgggtatattgtatgtgtatatatttatgccttatatggtatattttgattcaggcatacaatatgtagaaatttcattagggtaaataagatatccgtcacctctagcgtttatcatttgtattacaaacagtgtaattatacacttttagtgcataatttaatgaagcaggtggattgcctgaggtcaggagttcaagatcagcctggccaatatggtgaaaccccgtctctactaaaaatacaaaaattagctggacgtggtcgtgcatgcctggaggctgaggcaggagaattgcttgaaccctggagggacagttttttaaataagattaaggactgaggactggttggggctcataaatgatatgagtaaagtgttagctaaaacagaagaaaaaggggtgcccaaacaagtcaccttaaaatttgatgcctgtgctgtcattaatagtaataagttaggaataaggtgtggttctcttaattagaaaagaggctatatggcagaaaataaatacaactgtcataaattagcactgtgtggaaataaatgtgaacactggtcttgtgtcatttaggccacttggattaaaaaaaaaaatgaaaaagatccatcccaccttcagaaaggaaaaaatggcccttcctgtactcagggacaatgtaaccccttagagctagtcataaccaatccccttgatcctcgctagaaaaaaagaggagcatgtgaccttaggaatcgacggggccagactggatccttgagtaaatatcttggttcgagaagcttacaaagactctcctgagccagtgtttcaaactttctatgatgaactaaatgtgccagtaccagaaattccaggaaaaacaagaaatttgtttttgcaattagccaagcatgtagcccagtctctcaatgtcacttcatgttatgtatgtggagaagctgtaataagagatcaatggccatgggaagcctgagaattagtacctacagtacctgatgaattcctggctcaaaagaatcaccctgataatttctgatcctaaaagcctcaattattaaacaatattgcatagctagagaaggaaaagaattcactcaccgcgtaggatgacttagttgtcggagacagaaactgtataatggtaccacaaaaacaatcacttggtggagttcaaatcacacagagagaaaatttagtaaattctcaaagttgcaaactggacccacctggagtcccaccgggactggacagcccccactggattatactggatatgtaggcatagagcttatgacagattactgaccagtaggcaggtagttgtgttattggcactattaaaccatctttcttcctactgcccataaaaacaggcaaactccttggcttccctgtctacgcttcccgcgaaaagagaatcatagctataagaaattgaaaaaatgataaatggccccctgagagaatcatacaatattataggcctgctacttaggcacaagatggctcatggggataccggacccccatttacatgatcaaccgaatcatatggttacaagctgtcttaaaaataatcactaataaaaccagcagagccttgactattctggcctggcaagaaactcagatgagaaatgctatatatcaaaatagattagccctcgactacttgccagcagctgaatgaggggtctgcaggaaatttaaccttactaattgctgcctacacatagataatcaagggccagttgttgaagacatagttagagatatgacaaaactggcacacgtgcccatgcaagtgtggcatggatttgatcctggggccatgtttagaaaatggttcccagcgctaagaggatttaaaactcttataataaaagttataatagtaataggaatctgcttactgctcccttgtttgctacctgtacttcttcagatgataaaaagcttcattgttaccttggttcaccaaaatgcttcagcacaagtgtaatatatgaatcactatcgatctgtcttgcaagaaaacataggtagtaaaaataaaagtgagaactcccactattgagagtctcaaagtgggggaataagggaggagaccacccctcatattgtcttatgcccaatttctgcttccaaagaaagaaaaagtaaaaactaaaaggcagaaatgaaatccacaagcagacagcccagcgccacaccctgggcctggtagttaaagatcaacccctgacctaatcggttatgttatctacagattacagacattgtatagaaatgcactgtgaaaatccctatcctgttttgttctaatctaactaccggtgcatgcagcccccagtcatgtaccccctgcttgctcaatcaatcatgaccctctcacacacatccccttagagttgtgaacctttaaaagggacaggaattgctcacttggggagctcagctcttgagacaggagtcttgccaatgcccctggctgaataaaccccttccttctttaactcggtgtctgaggagttttgtctgtggctcgtcctgctacaccctctccagaatcatgggccatagttccaggggagaacccttccaaactaaagctaagaaaatttacctatcttccatctgttctgttactccttctccttttccccttctattgctaatcctctcgttattaatgtaactaggttgggctcaccccaaactatttcctttagtgcttgcctcattatgccctgtgaaaatctccagagtcaaaaacagctctcagcctcagagaaatatctctgtcacttttggacaagaggctccccctaacacgactcctgttctttaacaaatgtaaaaaaaacaggcctgccacagctggaatgatgttttataaacaatcgaatatcagggctggacctcatcaacaagtggttgtatgtccttaaagccatatatttgctttgctaaaggaaacactccttccaattgccagtttaaccaatgtaatctggtgcaaatttctattctcacccccacttctatggatcctaaccccactttgatttgagctgcttctatggcataagacccaacttggctggcacaaatctcatagggtctttcaaaatgcgtctaatcatccctcatgctcttcactcccctctcttctaagctcttttctaaccagactgtcatatcttctatgcccagtgataagactaaaatagatattgtaaaagtaactaatttaaggcaaactttaacaattaaaacaagataccaagatacaaatgcctggttaaaatggatcaaatattctgtgcacacattaagcaaaagcaattgttatgcttgtgcacgcggccagccagaggcccaaattgtccctttcccactcagatggtcttctagttgaccaggcataaactgtatagtagctcttttccaagaccccacagcctagggtaataaatcctgctgagctctctctctgctatttcttaaagtccaacaccctgtgggtcaggccccaagagccatccagcctccatctcctagcgtcaattttacctcgtgtctctcacgacaaggggaaaacttggcatttcttggagacttaatgggatacagtgagcttaagcctttccaagatcttaccagtcagtcttcccttgttcatctttgagcaaatatatggtggtattgtggtggacccttactggacactctgccaagtaactggaacggcacttgcactgttgtccagttggctatccctttcactctggcatttcatcgactagaaaaagaaaaaccacaacactgtaaaataagagaagccccttatgtgtcttttgactttcaagtttatttagacacaactggagtcccacgggtggtacctgatgaattcaaagcccaagatcaaatagctgcaggatttaaatcaatatttccacgggtaactattaataaaaatgtagattagatagataaatcacatctattataatcaatattagtttattaattacaccagaaatgctgtcaaagaaatagccaaccaattaaggcctactagccagataacttagaaaaacaaaatggccctggacataatattagctgaaaaaggtggagtttgtgttatgattaaaactcaaatgttgtaccttcatcccaaacaatactgcccccaataggaacataagaagggccttacacgaacttaccactttatccaatgaattagctaaaaattctggggtcaataacacgttttcagaatggctagagaggtggttcagtaaacgaaaaaaagtcatagcctcaattcttacttctcttatagttgtaataggtgtactaattcttgttgggtgttgtgtcataccatgcatctgtgggctagtacaaagacttataaaaacgacacttacgaaaacctcccttagttctcctccaccttattcagataaacttttccttttaaaagatcaagtcaaacaacaaagtaaaggtatgtttaaaaagttttaaaaagcgtgtggtcgcagtggctcacgcctgtaatcccagcactttgagaggctgatgcgggcggatcacccgaggtcagaagttagagaccagcctgaccaatatgaagaagccccatctatactaaagacacaaaattagctggtcgtggtggcacatgcctgtactcccagctactcgggaggctgaggcaggagaattgcttgaacctgggaggcaaatgttgtagtgagccaaaatcgtgccattgcactccagcctaggcagcaagagcaaaaactccatctcaaaaaaaaaggtttttttttaattataaaaattaaaagggggaaattgtaaaatacaataaaattcctcttcaaaggtttagtcttaactttcttgttctttgttctcaaactcaacttgcttgttctccatgcctccttgcccctagttactgtaacaaccttccttcccaacagctctaatcaataattcacatctgttcccttgattactcactctgcagccttcccacccttcaaaaccacacgtcccaccactgtgacttatacatgccccttcccttccttatttggaaaaatatttacaaatagccaatcgggtcagtttagattgtggggtccgaccctagcccatgggggagtaacacagaggaagagactttacgttaaaaataaaaaccccttccctcctttgttcagggtgctcttgcgatcgtgattaatgcaaacaaaaaccttttgcagaagtaaattgccttactaaaaaaacttttgcctgagtactggtttcactttgcgacaccaaacactttacttccaacggtattattaatatgacaacgaaatacttctgttcaccttttcaatacattcaaaaagagagagtaaaaaagagaatgttcccatgctctggggtggacgtggctcagctcagagaggaagccctggctgaaaaggctgcagcttaggctgttactcttcttcactcagcccagcatgtgatcacatcttctgtcactcaggtcctgagggggcgggaccttaagaattatccaatcagggacgctgggctggaaacgtccaatcaggcaagcagccggaccgaacagggcggcttctggtttggcgggtcctttgtctctcggtgcagccggagctccaggtctcctcttcactactctgtgtcctgtgctcctacaggcccagcctctgtggccctgtgacctgcaggtattgggagatccacagctaagacaccaggacccctggaagcctagaaatggtgagagtgccggtccgacatcccaagcgacggggaggggctggttggaaccggtggaaagtgacggtggcgggactcaggtatccccttagtcagctccacaatctgcgccggagttcttgcccagctcggcctcggttcccttcagccataagatggcggctgcgcttatagcgcagcccccaggcgtcctgtctcttcactgtgcggtgactgtgccctggcttggagccctcgctgggcagctgcgcacccgcagagccgcttctctcccagattgtgcagagaccacgggagagtcgtcaggggagaatcctgactcggagtgcgggttcacgaatgggaagagctttagtgggttgggttcacagtttctcttttctcctattaaaaatttatggggctgggcaaggtggctcactcctgtaatcgcagcagtttgggaggccgaggcgggcggatcacttgaggagttgttagggcagctaagttcctcttcagagactcaacttcctggtcataagttgtaaaaattgtaaatcaaccctaccccttctttttccccattctccttttctcaaaacatcgcgcgtttaccctatatggaaaaagtttgtgtctagcccaaccaggatcagcttagattgtgcggtgggacctcagccaatatgggaaggacacaaaaaccggaactgcgttagggttaaatccccttcctggcccagcgcggtggctgatgcctgtaatcccagcactttgtgaggccgtggcgggtggatcacaaggtcaggagttctaggccagcctggccaacatagtgaaaccccgtctctactaaaaatacaaaaattagccgggattggtggcaggcgtctgtaatcccagctacttgggaggctgacgcacgagaattgcttgaacctgggaggcgaggtgcagtgagccgagagcttgccattgtactccagccttggtgacaaagtgagactccgtcttaaaaaaaaaatagacatcttaaaatttccttcccttatgtaaatactgtgtttgagtaatttcacggatttttcaaacactgagtttcaaaaaccaagtgaataactctgacatgacaaagcttgagcctagtgactccaagctaaggctaatattaagcctaaaacagaaggttttttttttggacagagttttgcgttttgctcttgttgcccaggtggagtacagtggcgcaatcatggctcactgaaatctccacctcctgggttcaagcgattctcctgcctcagcctctcaagtagctgggattacaggcatgcaccatcatgcttggctgattttgtgtttttagtagagacgggttttctccatgttggtcaggctggtctcgagctcccggcctctggtgatctgcctgccttggcctcctgaagtgctgggattacaggcatgagccacagggcccagccaacaggagtttataaagtcctatttagctttttctggggagcctcccctgcagatgtcccagcctattcaccggagccatggaaggaggcgttattctgagagaaggtacagagccccagaaagctggggccccacaagcagatgcagttaaggttaagatgaaaggaaactgggaggatcttttttttttttttttgagatggagtctcgctctgtcgcccaggctggagtgcagtggtgcgatctcgactcactgcaagctccgcctcccgggttcacgccattctcctgcctgagcctcccgagtagctgggactacaggcacccaccaccacgcccggctaattaaaaaaaatttttttaatagagacggggtttcaccgtgtgagccaggatggtctcgatctcatgacctcatggtccacccgcctcggcctcccaaagtgctgggattacaggcgtgagccaccgcgcccggcctttgggaggatcttactgacgatgaagttgttattgttttgaggaacattttagactttgtaaaataaaaacgttaatttatgtaaaagatgaatttcaaaaaagtattacaacaggaggaagtaccaactaactctaaaatctttatggcttgcaaaaatgtaggcagaaaagggcttttctccctagggaggagcaaacaagattagaaaggaggtgggaggggaatggcaaatggagggtgaaaaagtcagattttacatcagagaatgtcttaccctgaaatcagcatgttcttaggagggatgtaaagtggggctgtatgttgactcagagtgagggtagctcaaagttcaggagcctgaggaagggagataaacctaagtaaagtttgattaggaaatattttattttaggcctggcccggtggcttatgcctttgggaggccagcactgggattaccagtgctggtaatcccagcactttgggaggccaaggcggacaggtcacgaggtcaggagatcgagaccatcctggccaacgtggtgaaactccatcgttactaaaaatacaaaaattaactcagcatgttggcgcccacctgtattcccagctactcaggaggctgaggcaggagaatcgctagaacccgagaagcagaggttgcagtgagccagatcaagccacagcactccagcttggcgacagagcaagactctgaaaacaaacaaacagaaaaaaatatttcaggccaggcgcggtggctcacacctgtaatccgagcactgtgggaggcagaggcaggcggatcacctgaggttaggagttcaagaccagcctggccaacgtggtggaaccctgtgtgtactacaaatacaaaaactaggcgggcgcttgtaatcctagaaacttgggaggctgaggcaggagaattgcttgaaccctgcaggcagaggttgcagtgaaccgagattgcgccgctgcactccagcctgggcaacagagcgagattctggctggaaaaaaaaaaaaaaaaagaaatattttattttgaccaccgaagacaaatacagctgatttttttttttttgaatgagaaataggagaaaatgtgcagagtgtgtgtctggctgtgtgataggtaagaaaagagagcactaagtcataagggaaagagtttttctataaactgtttctggagcacacaaaggacggagaattgtattaatcacaaatattttccaggattatctatgtgtttcatctttccccatctcttttctttgttctatgcatttcttccttttggcttttcctgggctgcatcttatatatgaaaccagtaaacataactacagtgttttgctgagttctgtgagtagctctaccaaattgttgagtttcgtggaggtgataggagtccccagtttttaaacagcagctcagaagcatagatgggcccatggggtttgtgtctggcatctgcagtgaggacaatgttgtggaactgagccctgaatcagggtctgtgctgtgtgtggtgtcagaattcaaatgttagacaatgagttggtgttggagaattgtttgatgttcagcaaactacagatttggtgccagaaaaaggatatcatggagccctagcctggaataaaactctgggtgtttgggaatgggagtctctgctctcctctacacaggctgtcacgctgcccattgtcctgaaattccaggtcttctcccagggtgagagatgactgaaaacttagagaaaatgagctctgatgacagactcccttttctcacagctgccaccacaggattcccacccactcacaaaaacacacacactagacattgacatgtccacacttctcccagaactatgcactaccctcaggaacctcaccgtggcatttttgatctgtgtttttttcaaagaattcacaagtgtctacaagtctcctggcatatccccacccccagacactgaatctgcagcagcaacctgttttctccaccaacctagggtctggaccacctgttcataatctcacctgcctgcattcgcacggaaacaaatcagggtacagccccacttgggccactatctgtagcaaaaatcagtcctttcacctacattgtgctctctctcactcagggatttttttttttcttttagcttttatttttggtttgaggtacccatgtgggtttgttatacagctgaaattatgttatggggatttggtgtgcagattattttttcactgaggtactaaacatagcaccaaacaggtatattttctgatcctcttactcctcccaccctccaccctcaactaggcctcagtgtctgttgtttttctctttgtgtttatgggttcttattatttagctctcccttgtaaataacaacatgcatttggttttctatttctgcattagttttctaagaataatggtctccagcttcatcaaagttattgcaaagaacatgatttttttttaaatggccacagagtattccatgatgtttatgttccatattttgtttttgctaaatcttttatttttggtctcacttatggcccaggctagagtgccatggcatgctattggcttactttagcctcagcctcccaggctcaaggaattctctcctacctcatcctcccaagtagctgaaactacacatatgcattaccacacctggccaattttttttttttccgtggagacagaattttgccatgttgccaggctggtctcaaacttctgagctcaggcaatccaccagcctcagcctcccaaagtgctgggattacaggcatgagccaccgcatctgaccatactgtattttctttattcattctaccattgataggcatttatggcctgtccatgtctttgctgttgtgagtagtgctgcaatgaacatgaatgtggatgtgtctttataatataataatttatatttcttcggcctgacagggtatatacccaattataaggtttctgggtcaaatgataattctgttactagttctgtgaggaatcgccacactgctttttacagttgttgaactaatttacactcccaccagcggagtataagcatctcctttctcctttctctgcaccttgccagtatctgttaccttttgactttttaaaaatagccattctgactggtgtgcggtggtatctcattgtggtttttctttaatttctgtaatgattagtgatgaacttttttttcatatgcttgttagtcacatgtatgcctgcttttgaaaagcatctgttcatggttatttttgcctactttttaatgaggttgtttggttattcttgtaaaattgtttaagttcttaataaattctggatattagacctttgtcagagacaaagtttgcaaatgttttcctttatttggtaggttgtctgtttactcagtttcttttgctgtgaaaacctctttagtttaaataggtcccatttgtcaatttttgcttttgttacagttgcttttcgtagcttcatcatgaagtctttgccggtttctgtgtctagaatggtatttcctagttatctttcagggtttcttataattttaagtttttcatttaagtgtttaatttgtcctgagttgatttttgtatatgatgtaatgaaggggtccagtttcagtcttctatatagtgctaggtagttatttgagcaccatttatgaaataagtaattcttcccacatttctcttgtcagctttggcaaaaatctgatggttgtaggagggtgtcattatttctgggctctctattctgtcggtcttgtgcactcatggatttttttataacatctttttctcttctgctttttcccccataaagattctttcaggtgcatctagtgtgcaaaattgaggtgtccaagagttcaaaaattctttaaaaagttcccaaaaaaattttgctattctctcttctctttagggatttagattatatatagatgttttttctgctttttaaaacatatatgtaaatcatactaacagctaaataaactttttgtaattttttctgaccccagattgtctttatctagtacttcagatttattgctttgttttggcttctgaaaagtttattttttccatttttagtccttcaaagtagacacagatttgtttagataaaagctcattttaggagcacacagaagcttagcacaaaaataggattaaatttagcaataccgaatgataaagactaaaagatactaagttccattgacagaaacctgattattcaagttaattatcaaatatttgcaggctgaagtgcttatactgcaaaagcaaaaacagttcagtgtgtaaactgaacagtggagtctgtagttgtgccttgctttctatttattacttcagaacaattagcatagttatgtgtagtatttgcagacaacctgcattcatataaatttaacagcattttcttttctttttttttttttttgagacagagtctcactctgttgcccaggctgcagtgcagtggcatgatctcagctcactgcaactgctgcctcctgggttcaagtgattctcctgcctcagcctcccgagtaactggcatgcatcaccacacctggctaagcttttgtatttttagcagagatggagtcttaccacgttcgccagcttgatcttgaactcctgacctcaggtgattcacccaccacagcctcccaaagtgctggaattacaggtgtgagccataaacagtatattctacaatagtatgaatataaagctgcaatacttactttgaatgaatcacttaaatggttattttaatattgttatttatacttttgaaatataaagtgtttgaagtatagttgcaatttttttaaatgctacatacattactactggtacattaaaatattcatacttatttatatctaatatccaaagaaaatttactaccaaagtgttacagttagtctgacatgtttgttactttattcaatggggatcattatgggtaaacacaattttagtatcttttgtttcactaaattggaacgctgctattacaggacaaataaagacaggtgatgtggccaccaaaaaccataatagctcttcagttaactatgttacaaggtctaatatgttccactgtatgaacacagtcagattctatttcttcatcaaaaagtgttgttggaagttgacagatgatttccatatagaacccccattcaatggctagaaaatgagactgcagcagagatggaaaagaaactttataaaatttttctgaaaatctgccctctttcttcataatgctcatgtttctcatactgagagtagctgtgcactttgggtgtttagaaataaattgcttttaggggcgtattttctggctgatgatcaatcttatatctaatctgagctttttcttgagatctttttaccttttttctttcaaaataatcttgctggccgggcgcagtggctcacgcctctaatcccagcactttgggaggccgaggtgggcagatcacctgaggtcaggagttcgagaccagcctgaccaacatggagaaaccccttctttactaaaaatacaaaaattagccaggcatggtggcacatgcctgtaatcccagctactccagaggctgaggcaggaggatggcttgaacccaggaggcggaggttgctgtgagccgagatcgcaccattgcactctagcctgggcaacaagagtgaaactccgtctcaaaaaaaaaaaaaaaaaaaaaaaaaatcttgctcagatggagatttggttttctctctaatgctttgggtgtctgtttcagaaatcctattagtatcccgtggtgtctgaatgaggtgggctgtcacagtgagaacttttgaagatatgtctatctggactcatgctgaaaattcagaagtattttttccatgtcatcattataagtagaaactgaggctgaaacactgctcacattctgattattgtgaaggtgaaattctatccatgacgcctgcaggctctcctcctgcagctcagacgtcactctctgatgtgacactagagtgctgctgtggcaaatggggttcacataaaatgtaagctgtgctctgggctgtgcctcagtggcagatggtagcggtaaagagaggacactagcaactaggagaaagtaaacaggagtgctgtagcccagtgccagggagtacagagccactgctctaaaatgtaaatagccaaaaagaacactattcagccatttttgtagcagagtgaaagcctagcttcagcagacacctggcttcaagctgctaaaccaactcctgttatgaagatgtgaaaagtttatttgtcattgaatataagcaattagtatacacagatggcctcttcagtatccaggtgaatttaggatgaactatatatgacatggtgctgaaaattcttctacttgtggactaattatgatgaccatctttctgactttgcagtctcttaagcagattgatgatgatgtatgtcacattcaagtttaattgtgtaataagaccattttctttctgttctattattgtggagtttctctgaaaatagagaaaatttttcttttaattattgtttccacagagtgtctagaattaccagacatgatataaacacataaggtgccaaccagaatttactgtagaggggactttccctctcagactttgagtcagcccatacttgcgcagcaaaatgcatgctgtccattaaatatgcacgtggaattttgtctctgcctatttggtattgatagttcctctactgtcacttctagagaggctagacccaatttctacaaacttcacagggcagcaattaattaatcatttaacctttttcagtgactcttgtatcttcagatttgaaactgattcagaaactatggagcccagaaacccaatcagagtaacatgtgtgtgctgagtagacatagagacatgagaatctccactttccccttcctcctcttgctaaatgctcacaaatgtacaggtaaacacctgtggctactccagtcgttcaggccctaaacttgaagctccaaattttgaatccaggtcttgagatttgggggaaaaaaaaacttacctaagaaatgcaagtccctttggttatcaaactcagacattaaaatgaaagtactgttatgtctttctcccccctttgaactatgtattcatctcttgaaactgttcactattgccacaagtaattataaattaaactaataatgccacattagacactatatcccataccctaaaccataataatatatatgtaatcaataatcgatgttatttctgtaaataaataaaaatttctgacaatcaactttgtatcagcccactctctgtccctgtcttgttgtctttacaaattgtcttgtaactgctggtaatcaaaatgcagattccaggcaacttgaatctttgctcccaggttataatccttaagcttgacccaagtaaactatctacttatattcatgttctttcagcttttttttttttttttcatgtagacttaccatttagaatgtgctagagtagtctctatgaggggatctctcctttgattgtattccacttgctgtaacaccaaaggatgcagagccaggtggatcctacctggaatctgcagataaggtctggcctctgcctgggatttacaagaaaggaccagaacttggattgagaatgtacagaaaatgaacaaaagtcattttctgcattgtgaatgtaaacatagacatcttacagcccccatttgggagtgtggctctttgagattttcacatcttgttcattgacctgctacagttatgtgaggggctccaggagaaatagactcagatggcagaatctgtaagtgtaaataagcatcttaggagtgagagatcggggccacaaagtatccagagccatgaccacaattatatttagctgtaaaatgtaatactagagtagagtatttttgatctttctcttacccaagagctagcaaatcagaatgggtgatccaggttctggagctccaccagggcagttccattttctattcagagttagcctgagtctctccagcctggcttatcattgggccatgaggcctgggtcactgggaatctctcacaatcacccaggtgtctttgaggcatttgaggatgtccagagcagaattttgtcaggctgacaagagtggttaattctgcttctgtctcagtgtaagagaaatgagtcatcctgtgtttgttcattccctcatacaagagatatctttggttggtaccccgatgacagcttctccagtttcctggtacttggataataaggagaagatctggagacccagatagataaactagctccttccacttcatatgggcattaaaaaaatacatgaagcagtcatagttcctacaatccagaaacttttagtctagactagctactggataagtaattgaagtgtgcatcatatggttggtataataaatagatgtgttaaaaatcttgggctttagaccactttctttatattgttgtgacttctgatgtctacacctgaagggagatttatgaacaaaataattgttataaattcttttttttttttgagatggtgtttcactctgtcacctggtctggcttgcagtggcacgatctcggctcactgtaaactctgccgcccgggttcaggtgactttcccttctcagcctcccgagtagctgggattacagttgcctgccactgcacctagctaatttttgtatttttactagaggcggggtttcatcatctggatcaggctggtctttaactgcttgacctcgttctgcacccgccttggtctcccaaagtcttgagattacaagcatgacccaccgcgcttggccgtatattttctatttcttttaccttgctaactgtagatatttattttctaataaaattaccctagaaaaccttaagggatttgtttaagttgcatactagtatatagtataaagttgtcagggcagtgactagaaaagataaaaactacagaaactctgggatttaagtttcttttaggtaagcttagaaacaaaacaaaactggaagtttcctagttgcatagagaacagaattctacatagggttctcaccctgccccagacgtgttcagattcatcctttttggagaccttagttaggtctgaacctaccctggagtattgcctcacagaactcattaaaggagatcagagttttggctgctgaatcctgctgcctttctagagctggtgctcacaatttcctgaaattcaaaagcagataaatcgggaaaaaaagtatgttttgtaaggtgtttgtttttaaattttttattaaaaccagtgcttgcagagacattgtatttagcaacttgttttctattcctgcagatccagtagttgctgcacaagtcaaaaaagtaaatataaacagaatgaaattttctctagactacattaaactcttctgtatctctttcatctgtctatatttagcttttattctatacaattttttaaaaaatttgatgacagagaaacagaagaaaaaataaaaatgggccctttatctaaatcctgaaaattaagaaacacttagtaccagctccccgggtgttaagagaattaaatcatataatgtgttatgcccagcaccgtgctctgtatcatactctagcacatagtgcctgcttaataaacattgcattagtacctgtgtacatgttctttttaaaatacagacttattcagatattgctgtcttctgtttcctctgtaaattttaaagagccagcaaaaaatataaaacttttaaatggaatgggctgtccttatttttactagaagtatttggttatggcaagagtgttaagtgtaagggaccctgtgctgttcctgctttctctaactaatgctcataatgagccagtggggagcaacatcagcattgacaggggacttgtttaaaacactcattcataaaccctcttcaaacatacagaatcacattacagaatgtgcggccacaattatcaagtgatttataagctcgttaaagcttgagaggcaatgcttagcttagtggttatcagcccaggcttctcattaggatcacatgaccaatttgctgaaatctcttgtaccctccccacagcttctgtttattgttgtgggtggaagcatccatgtttttttaatgaagtgcctcatgtgactctaaggtgattccagaatcaagtataagggctttaaaatatattcatgagagttaaattccacctgtgaactagagggtggtcacagggcctattctatttgggtttggtagggacaggtaagtgtggtgcatatttccattactgtagcaaaagttgctggtgtctatggcaggggagggcacctgaggacaggaaaggagaaacttatatttttatcttcatggagcagttcattgttcccgaatctcttctgttttaaaggacagaaatgggtggctttttctgtctttttctgccagaagatgtcatgctagcaggtaaacatgtggtacacctttaaaggcatattctccagatgcaggtgtaatttgtacagagaatctcatctgagaagaaactccagggaaggaggagaaagaaaaaaaaatggcttttcttcaggtaaacatgtgtcagatgaagagctgtgtccactctgcctcctggactgccatgcgtttagtactcacaaacctttacttctctacttttgtttttcctccgtgagtttgatttaactacttcttaaaattcctatgatggtcaaggatctttgaaaaatatttcttttttatatcccacagacttctctacattctgtttgtcatagcttcttatatgccatgcagaattatcagcaagaatttatgatccacattattaaaaatattccctttgtggctgttgaacacagaaagatgtgggtactcaagattcctattggggaaaactgtggtccttagtaaagatggtaaagtaaaagcctccactcgtgttccattagctatatgcagaagataattcagaaaatgcttatttaaatgggatagaatttattacccagaatgttctgaaaaaaattattaggagatacttgctctctagggtgctaaatgaagcctatttaaaattactactaaaaattacagaacataggagttaactgtattttggagtttgcataaaactgatgtttctttatggttaaattcagattataatttacgttatttgggaggaatatttcaacagtgatactgtgttctgtgtgcattaacacatcagaaaaatttgtcctagtgcagttaatggttaatgattcacttggtgaagtagctctctctcacagattttttcactatagttaattatttttctcttcattattaagcatccttatccagcggatttgcataaaccatcacatttaatctgtcagttgtccttttttctttttttttctatatagttttctatggaagatgaaggctgttatctttgtttacaggccacaaaaacttggaaaaacacaggctcttccacttactggatgtttgacaaaatatccttctcgggccaaaaacattgacatttttggtgagcttgttagaaattcaaaaaatcagacttcattccagatcttctgggaaaaaacccccgcataacaaggtcttcagcttattgtacatattaaaatttgagaggtgacttctaactcaacatgtcttttccatatgaaacatattcacatctcattctgtatgatgtaaatatagcactcaaaaatgtacatgttcatgttcatgcccttaattttatactttattatctagaaaaatatcatatatgaactgatgttgtggatctaatgctgccctttttttctcagataatacattagagaatatttctgtgttgaagattattttattggataattttagtcagtcctataagtcagaaccacttctctttactctctcatttcaccttaagtaaaattaaaaattccacccatggccacttggtgaaaatgtgtgtgtgtgtttttcagggaccattgcaatttagagatgtggccatagaattctctctggaggagtggcattgcctggacactgcacagcggaatctatataggaatgtgatgttagagaactacagtaacctggtcttccttggtgaggataactttaatacataattcataatacaccctaaaggttttatttctcttttttgtagaatgttttttagtaatttattctttgcataaaggagtttcagatccattttttccagaaaatcttcagaatttgttcatttagaaaagaatttcttcagtgcctcttgcctgtatagttctgactttgggaggctagggcggaggagattgcctgaggcgaggagttcgagaccagcctggccaacatggtcaaaccccatctctactaaaaatacaaaaaattagccaggcgttgtggcatgcggctgtaatcccagctacttgggagggtgaggcaggagaattgcttgaacccaggacacggaggttgcaatgagccgagatcgtgccgttgcactccagcctggatgacagagcaagattacttctcgagaaaaaaacaaaaatttcttcaagatgtttcatcttaatccaatctttccacattcctgagttgagctgtattcttcactctaaattagtggtaattacagaaatttactgacgtaaaatattgtagcccccacctgaaaatctaaatgccaccaccaatttttgattcagtggtaccaggtagtaaaattaagaaacctacaaattggaagtattttctttttcctttttttttttttttgagacggagtcttgctctgtcacccaggctggagtgcagtggaatgatcttggcttactgcaacctccgactcccaggttcaagcaattctcctgactcaatctcccgagtagctgggactacaggcatgcattaccatgctctgctaatgtttgtatttttagtagagatggggtttcaccatgttggccagtctggtctccaactcctgacttcgtgatccgcccgccttggcctccccctgatctcatgatccacctgctttggcctcccaaattgctgggatcacaggcgtgagccactgcacccggcaaattgaaagtattgtttaaatatctataaatttctgttataaatttgtattttggtattaatttactagaatattttatcacatcgtctttgctgagcacattactagcttgtaattggagaatatgagcaagattcatgttatttattcttaacaaaacaggtattgttgtctctaagccagacctgatcgcccatctggagcaaggaaaaaaacctttgactatgaagagacatgagatggtagccaacccctcaggtaggtgtgagtgaaaatgaatacaacagacaacacagtaagaggtcccaaggccaaagagaaagccagtccttaaaatgtgattcgggaagctgtgttccaaaggaaatagttcctgggcagctgttttttgtttttgtttctgttttttaattttgttctcacaaagggacatcttccgttttatgcttttaaattctctaaggattctacttttgttttggtgagcttccttcaagttctcagtgagagccacagtcctcttgatggcatataagagattatacaatctggctgcttttccattcttttggggacacaaaaatatttgcatgattttgaaaaactaaaactactttttagttctatttttgcatcaggtctaaaatgtgtgagagtagtttctgttgcatttttttgttcatttttctttatagtccattctatttttattactacatagtttttaagtatagtttgcaattatacatatgatatgcttctgctttgttctttttcctcaagattgctttggctattcacacttttattgtagtttcatgtaaattttagaattgtattttccattactgtgaaaaaaataccactgcaattttgataggaagtttattgaatctgtagattactttggataatatgacactttaataatacttattcttcaagttatagacataaaatattttaaaatttatttggatcttctaatttttttattgtaaagattttttatctcttagttaatttttttcccagtagttttttttaatgctacattaaataagatttttcttcctctattttgtcaaatagtttcttttaagtgcatgaaaccattcatatacttgtgtgttaattttctgttttggtaatttactatttactgagtgtatttattagtttagacagctttttaaattttttttattttttgacagtttcgctcttgttgcccaggttggagtgcagtggcacgatctcagctcaccaccaccacacctggctaattttgtatttttagtagagatggggtttcaccatgttggtcagagtggtctcaaactcccaacctcaggtgatccacccgccttggcctttcaatgtgctgggattacaggcatgagccaccacgcctagctagacagtttttaatatactgtttatggtttttaaaatatgagattgtatgatctacaaacagcaactttttacttatttttcttcaatttcagtgactttctttccttccttccttccttccttctttctttttttttcttttttttaattatactttaagtcctagtgtagatgtgcacatcgtgcaggtttgttacacatgtatacatgtgccatgttggtgtgctgcacccattaagtcgtcatttacattaggtgtatctcctaatgctatccctcccccgtccccccaccccacaacaggccccagtgtgtgatgttctccttcctgtgtccaagtgttctcattgttcaattcccacctatgaatgagaacatgcggtgtttggttttttgtccttgcgatagtttgctgagaatgatggtttccagcttcatccatgtccctgcaaaggacatgaactcatcatttttttatggttgcatagtattccatggtgtatatgtgccacattttcttaatccagtctatcattgttgtacatttgggttggttccaagtctctgctattgtgaatagtgctgcaataaacatacgtgtgcatgtgtctttatagcagcatgatttataatcctttgggtatatacccaacaatgggatggctgggtccaatggtatttctagttctagatccctgaggaatcgccacactgacttccacaatggttgaactagtttacagtcccaccaacagtgtaaaagtgttcctatttctccacatcctctccagcacctgttgtttcctgactttttaatgatcgccattctaactggagtgagatggtatctcattgtggttttgatttgcatttctctgatggccagtgatgatgagcattttttcatgtgtcttttggctgtataaatgtcttcttttgagaagtgtctattaatatccttcgcccacttttcgatggggttgtttgtttttttcttgtaaatttgtttgagttctttgtagattctggatattagccctttgtcagatgagtagattgcaaaaattttctcccattctgtaggttgcctgttcactctgatggtagttttttttttgctgtgcagaagctctttagtttaattagatcccatttgtcaattttggcttttgttgccattgcttttgttgttttagacgtgaagtccttgcctgcctatgtcctgaatggtattgcctaggttttcttctagggtttttatggttttaggtctaacatttaagtctttaatccatcttgaattaatttttgtataaggtgtaaggaagggatccagttccagctttctacatgtggctagccagttttcccaacaccatttgttaaatagggaatcctttccccatttcttgtttttgtcaggtttgtcaaagatcagatagttgtagatgtgtggcattatttctgagggctctgttctgttccattggtctatatctctgttttggtaccagtaccatgctgttttggttactgtagccttgtagtatagtttgaagtcaggtagcatgatgcctccagctttgttcttttggcttaggattgacttggtaatgtgggctcttttttggttccatatgaactttaaagtagttttttccaattctgtgaagaaagtcattggtagcttgatggggatggcattgaatctataaattaccttgggcagtatggccattttcatgatattgattcttcctacccatgagcatggaatgttcttccatgtgtttgtatcctcttttattttgttgagcagtggtttgtagttctccttgaaaagatccttcacatcccttttaagttggattcctaggtattttattctctttgaagcaattgtgaatgggagttcactcatgatttggctctgtgtttgtctgttattggtgtataagaatgcttgtgattttttcacattgattttgtatcctgagactttgctgaagttgcttatcagcttgagattttgggctgagacgatggggttttctagatatacaatcatgtcatctgcaaacagtgacaatttgacttcctcttttcctaattgaataccctttatttccttctcctgcctgattgccctggctggaacttccaacactatgttgagtaggattggtaagagagggcatccctgtcttgtgccagttttcaaagggaatgcttccagtttttgcccattcagtatgatattggctgtgggtttgtcataaatagctcttattattttgagatacatcccatcaatacctaatttattgagagtttttagcatgaagggctgttgaattttgtcaaaggccttttctgcagctattgagataatcatgtggtttttgttgttggttctgtttatatgctggattatgtttattgatttgtgtatgttgaaccagcctggcatcccagggatgaagcccacttgatcatggtggataagctttttgatgtgttgctggattcggtttgccagcttattgaggatttttgcatcgatgttcatcagggatgttggtctaaaattctctttttttgttgtgtctctgccaggctttggtatcaggatgatgctggcctcataaaatgagttagggaggattccctctttttctattgattgggatagttccagaaggaatggtaccggctcctccttgtacctctggtagaattcagctgtgaatccatctggtcctggactttttttggttggcaagctattattgcctcaatttcagagcctgttattggtctattcagagattcaagttcttcctggtttagtcttgggagggtgtatgtgttgaggaatttatccatttcttctagattttctagtttatttgcgtagaggtgtttatggtattctctgatggtagtttgtatttctgtgggatgggtggtgatatcccctttatcattttttattgcatctatttgattcttctctcttttcttcattagtcttgctagcggtctatcaatttggttgatctttgcaaaaaactagctcctggattcattgattttttgaagagttttttgtgtctctatctccttcagttctgctctgatcttagttatttcttgccttctgctagcttttgaatgtgtttgctcttgcttctctagttcttttaattgtgatgttagggtgtcaattttagatctttcctgctttctcttgtgggcatttagtgctataaatttccctctacacactgctttaaatgtgtcccagagattctggtatgttttgtctttgttctcattggtttcaaagaacatgtttatttctgccttcatttccttatgtacccagtagtcattctggagcaggttgttcagtttccatgtagttgagcggttttgagtgagtttcttaatcctgagttctagtttgattgcactgtggtctgagaggcagtttgttataatttctgttcttttacatttgctgaggagtgctttacttccaactatgtggtcaattttggaataagtgcagtgtggtgctgagaagaatgtatattctgttgatttggggtggagagttctgtggatgtctgttaggtctgcttggtgcagagctgagttcaattcctggatatccttgttaactttttgtctcattgatctgtctaatgttgataatggggtgttaaagtctcccattattactgtgtgggagtcttaagtctctttgtaggtctctaaggacttgctttatgaatctgggtgctcctgtattgggtgcatatatatttaggatagttagctcttcttgttgaattgatccctttaccattatgtaatggccttctttgtctcttttgatctttgttggtttaaagtctgttttatcagagactaggattgcaacccctgcctttttttgttttccatttgcttggtagatcttcctccatccctttattttgagcctatgtgtgtctctgcatgtgagatgggtttcctgaatatagcacactgatgggtcttgactctttatccaatttgccagtctttgtcttttaattggagcatttagcccattgacatttaaggttaatattgttatatgtgagtttgatcctgtcattatgatgttagctagttattttgctcattcgttgatgcagtttcttcttagcctcgatggtctttactatttggcatgtttttgcagtggctggtaccagttgttcctttccatgtttagtgcttccttcaggagctcttgtagagcaggcctggtggtgacaaaatctctcagcatttgcttgtctgtaaaggattttatttctccttcactgatgaagcttagtttggctgggtatgaaattctgggttaaaaattcttttctttaagaatgttgaatattggcccccactctcttctggcttgtagagtttctgccgagaggtcagctgttagtctgatgggcttccctttgtgggtaacctgacctttctctctggctgcccttttttccttcatttcaactttggtgaatctgacaattatgtgtcttggagttgctcttcttgaggagtatctttgtggcattctctgtatttcctgaatttgaatgttgggctgccttgctagattggggaagttctcctggataatatcctgcagagtgttttccagcttggttccattctccccatcactttcaggtacactaatcagatgtagatttggtcttttcacatagtctcatatttcttggaggctttgttcatttctttttattcttttttctctaaacttcccttctcgcttcatttcattcatttgatcatccatcactgacaccctttcttccagttgatcaaatcagctactgatgcttatgcatttgtcacatagttctcgtgccatggttttcagctccatcaggtcctttaaggacttctctgcattggttcctttagttagccattcgtctaatcttttttcaaggtttttaacttctttgccatgggtttgaacttcctcctttagcttggagaagtttgatcgtctgaagccttctcttaactcatcaaagtcattctccattcagctttgttccattgctggtgaggagctgtgttcctttggagggggagaggcactctgatttttataattttcagtttttctgctctgtttttccccatctttgtggttttatctacctttggtctttgatgatggtgacatacagatggggttttggtgtggatgtcctttctgtttgttagttttccttctaacagtcaggaccctcagctgcaggtccgttggagtttgctggaggtccactccagaccctgtttgcctgggtatcagcagcggaggctgcagaacagcgaatattggtgaacagcaaatgttgctgctccagagatcattcctctggaagtttcatctcagaggggtacccggccgtgtgaggtgtcaatctgctcctacttgggggtgccttccagttaggctactcaggggtcagggacccacttgaataggcagtctgtctgttctcagatctcaagctccatgctgggagaaccactactgtcttccaagctgtcagaggtttctcctgcaattttgtttggctatgccctgcccccagaggtggagtctacagaggcaggcaggcctccttgagctgtggtgggctccacgcagttcgagcttcctggatgctttgtttacctactcaagcctcagcaatggcaggcgcccctcccccagcctcgctggtgccttaaagtttgatctcagactgctgtgctagcaatgagcgaggctccatgggtgtaggaccctctgagccaggcatgggatataatctcctggtttgccatttgctaagactgtcagaaaagtgcagtattagggtgggagtgacccaattttccaggtgctgtctgtcacccctttccttggctaggaaagagaattccctgatcccttgcacttcccaggtgaggtgatgcctcgccctgcttcggctcacacttggtgtgctgcacccattgtcctgcaccccttgtccgacaattcccagtgagatgaacccggtacctcagttggagatgcagaaatcatccgtcttctgtgttgctcacactgggagctgtagactgcagctgttcctatttggccatcttggaactgtccccttccttccttccttccttctttcttctttcttttgttttttggtgggatttcagtcttgttgcccaggctggagtgcaatggcatgatttcggctcactgcaacctttgcttcctgggttcaagcaattgtcctgcctcagcctccagagtagcttggattacaggtgtttgccacaatgcctggctaattttttgtaattttttagtagagatgaggtttcaccatgttggtaaggctggtcggaaactcctgaccttagatgatccgcccgtctctgcctcccaaagtgctgggattacagccgtgagccaccgcacccagccggattttttttagttctgtgaataattttctgtcacatacttctagtgctacattcaaatagatgtattgccaatggacacaatatagttttgtattggtgtctgaatatgatggagcaaacacctcttcaagttttcataaaccgatttttgaagcatttcctcaggtaactgtgtgggtttctttttttctttctttttttttttctctttttttgaggtggggtttcattcctgttgcccaggctgaagtgcaatggtgcaatctaggctcactgcaacctccacctcctgggttcaagagattctcctgcctcagcctcccaagtagctggaattacaggcatgtgccaccacacccgggtgattttgtatttttagtagagagggggtttctccatattggtcaggctggtctcccaactcctgacctcaggtgatccacctgcctcagcctcccaaagtgctggaattacaggcatgaggcaccccgcctggcccaactgtgtggatttctatgtagacagaactgaccataaactgtggttcaggcaactgaaattgaatcattgatttgcttcagggaacgcagtaaaagcgaaggtctgtaggcctgcctacatggctgtacatggatgcctttattcaggtctctggaatggcatgacctctcccagactgtggctgggatgagtttgggatggttacagagtaagttcagaattctcagtgagaccaagttggctgaactctatcctgggctgtagccaagaacaggggtcctgtagtttcccacctgaatgaaggcctcccttctgaatagaacacgtccaatcttcagctttaacagcatttcacaactccctccccggatctcaaatttctgttagaggcacttattttggagatgtcatcttgctacataatccaggctggtctcaaaatcctgacctgaagcagttctcaaaccttaatgtaccgtggagctgtcattacagttgtgaaccataatgcctggttttctcataaaggcatgtttgtcaaggatggttgagatcttttttgctgtaaggggatatgaaaatagggcacttttaatcttttcatcttactgatgtcactctccctgtagatttttactttctattttctacttcaaatttgtctgtaatttgagattcagatatttaggacaatatgctagaatttgcatggtatgcctcaagtaaattagataattagtaggcactccatatttacgaaaatagttacttgtaaatttcagtttgctgcaggcaaaaaggaattaaaggattttcatctacttactttaacctatatctaaataataatatactttattttctaatatttgttttacatatcagagggtctaaccctattctgcaaaatatgtattttctttatttaaaaatgtaagactactctttgcttctaaaattggattacagcagtttcattttgtgtaagaatagcatatatttaaaacaaaagtaactctaggttcttttaaatgctaatttattaagtttcttattagaatcttctatttataattatacggcatattctctgaaattttactgccatacagtgcataccaatgattcaaaatacctgcacttcatgagtacaaactaaaagctaaatattgcagttacctagaattttttttttttttttttttagatggagtcaatctctgtcatccaggctagcgtgcagtggtgcggtcttggctcactgcaacctccacctccaggttcaagccattctcgtgcctcagtctcccaagtagatgggattacaggcatgtgtccccacacccagctaaattttgtattattagtagagacggggcttcactacattggccaggcaggtcttgaactcctgacctcaggtgatccactcgccttggcctcccaaaatgctgagataacagacatgagccactgcacccagcctgacaattattttttttgtgatacatcaatgttgcatactagattttatgaggaaacatttctattattgtttcaaagttccatattagtgtgttttctcagtgtagggttttttttttttccgagacagagtctcactctgtcgcacaggctggagcgcagtggcgtgatcttgcctcactgcaacctctgcctccggggttcaagggattgtggttcgtgcctcagcctcccaaagtgctaagattacaggtgtgagccactgcacccagcctcattgtaggtttcttaacattagtttcttgtgttttttgattttacttaagtattataattttagacaatttgtaattctgttggtacactttaagtcaatttgaggtttaattaagaaataaattatgcatgtctatcaatcagattatatatgtatatgtgtatatctataaatatgactccaattttagttatggcttatattctttcttagctgattttcgatggtagttttatcttgtctaagtgagagtcatggagatagtcttattttcaccatgtgtttaatgattaatgtatatttctttttgtgaaagaaacacttttgtgatttgaaggtaattttcaaaaagatttataattctgtatttttttcagtttttctttaaaaacattgttttaaaaacacataacataaaatttaccatcttaaatttattgaagtttatatttcagggccaggtgtggttgtggtgctcatgtgtaatcccaggattttgggaggtcaagccaagaggatccctggagcccaaaagtttgagaacagcctgggcaacatatggagacccctctctatgaaaaaaatttaataatagccaggcatggtggtgtgcagctgtggtcccagctacttgggagattgaagggagtcaaaattgtgccactacactccagcttgggtgacagagtgagaccctatctcaaaaaaagctgttcatttcaggcatgttaagtatattcacattgttatgcaaaagacttctagaaacttaacatcttgtaaaacttaaattcaatgtccattaagtaacaactgctcattttaccctctctccataccttgagagacaagccttctactttctgtttttatgattttgactacttaagatatctcataagtggaatcatacagtatccataattttgttactggattaattcaggtgacataatattcacaaggttcatctaaaaaggtgacaagattattctctttaaggtggaataatattccattgtatgtatatgttacattttttaatatgtttataagtcaagagacatctagggtgcttcagcctattggcttttgtgaatactgattacaataaacatggatttgctttgctgcccaggctaaagtgcagtggtgcaatctcagctctctgcaacctctgccttctggttcaagcaattcttgtacctcagcctcccaagtagctgggattacatgtgcatgccacatcgccaagctaatttttatatttttagtagagatggtgttttaccatgttggccaggctagtctcgaacttctgacctcaggtatctgccaacctcaccctccccagttgctaggattacaggcttgagacactgcacctggcctgtgttaacatgttttggatatagatttatgaatacttttttccatttatgtatttttatgtctaagtagtttatttaaaatatgtttttgtatcattcaagaaaataagccaactttatcagtgttgataatcagttcttgaagagattatttttctctattttgtaaacatggcaactttgtggaaaatcatttgatcatatacaaaatggttcatttctgagctctctattctgttctttcatctgtttatgtttgtgtcagtatcatattgtttatgttactgtagcttttaactgtaggttgtattgatatctttgaaaaatgaaatttttgacccctgagcaagaatatattgaagagtgtgtttcatattcacatatttttgaatttgccagtttgacttttgctttttaatttctagttttattcaggttttattagaaaacaacccagtgcataattttagtgtttttaaattgatttgttgttgttttgagacaagatcttactgtcacccaggctgcagtgcagtggcagaattttagcttattgtagcctcaacctcctgggctcaagtgattgttctttcacctcagttttttgagtaggtaggactgtagacatgcactaccatgtaaggctaattgtttgcttttttgtagtgttaggatctcactatgttgcccaggctggtctcaaacttttgacaccaatggatctcccaaagtgttaggattataggcaagagccatggcacccaatcagtatttttaaatttaataaaacttgttatgtgtcctaacagaatataccaggtgcaaataagaatattgtgtattatcttggttttgactggagagttttgtgtgtgtctgtgaagcctagttggtctataatatggtttggatgtctatgttgtccaaatctcatgctgcaatataaatcctcaatgttggctatgggacctggtgggacacgtttgggtcattgggggcaaatttctcatgaatggcttggtacatcctctcggtaaccaaaaagtttacactgtatcaattcaaataagagctggttcattaaaagaacgtggcttcttcacctcatacttgctctgtctcttaccatataatatgtccagttactctttaccttccaccttcattttaagctttctgaaatcctcaccagaagcagatgctggcacacacttcttatacactctgccaagctgtgagccaaataaacaatttttctttataaattatgcactctcaagtatttctctatatgcaaaagaatcaatatagtctataatgttgtctaagttttttggttgttattttttacctgaattttctattattgcaaactgggtcttgatgtctacaatcattatgttgctatgtatatctcgcttcacttttatcaatatttgctttatatattttggagctctgatgttatgtacacatatacatatagatagataaatattttagttatacattcctgctaaatcaactcactttaccatcatataacgtaggcaccagccccacaggattagtgggtttttctccctgtgtgcagagataagagattgtagggccgggcgtggtggctcacgcctgtaatcccagcactttgggaggccgaggcgggcggatcacgaggtcaggagatcgagaccatcccggctaaaacggtgaaaccccgtctctactaaaaatacaaaaaattagccgggcgtagtggcgggcgcctgtagtcccagctacttgggaggctgaggcaggagaatggcgtgaacccgggaggcggagcttgcagtgagccgagatcgcgccactgcactccagcctgggcaacagagcgagactccgtctcaaaaaaaaaaaaaaaaaaaaaaaaagagattgtagaaataaagacacaagacaaagagataaaagacagctgggcccgggggaccactaccaccaagacgtggagaccgatagtggccccgaatgtctggctgcagtgttatttattgaatacaaagcaaaaggggcagggtaaagagtgtgagtcatctccaatgataggtaaggtcacgtgggtcacgtgtccactggacagggggcccttccctgcctggcagccaaggcagagagagagagggagagagagagacagcttatgccattatttctgcatatcagagacttttagtactttcactaattttgctactcttatctaaaaggcagagccaggtgtacagtatggaacctgaaagcagactaggagcgtgaccactgaagcacagcatcacagggagacggttaggcctccggataactgcaggcaggcctgactgatgtcaggccctccacaagaggtggaggagtagagtcttctctaaactcccccagggaaagggagactccctttcctggtccgctaagtagcaggtgtttttccttgacactgaggctactgctagaccgcggtctgctaggcaacgggcgtcttcccagacgctggcattactgctagaccaaggagccctctggtggccttgtctgggcataacagaaggctctcactcttgtcttctggtaacttctcactatgtcccctcagctcctatctctgtatggcctggcttttcctaggttgtgattatagatcgaggattattataatattggaataaaaagtaattgctaccaactaatgattaatgatattcatatataatcatatctaagatctatatctggtataactattcttatcttatattttattatgctggaacagctcatgtccttggtctcctgcctcggcacctaggtggcttgctgcccacaatataatatcaatttttgtcttgtagaagtacttgatttaaagcatattatgtctaatataattatgaccaccttactcaattgtggttgctattttcatggaatatacatttttttcattctgttactttctgcctatttgacttaatgctaaagtaagtcccttgtaggcagcacactgtatgcttttttaaaaaaaccacttaggcattctatatctttttctttatataattttatttatatatatatttatatttgtatttatttatttatttattttatttggtttgtttttgagatggagtttcactcttgttgcccaggctggagtgcaatggcatgatctcagctcactgcaaccttcacctcccagtttcaagtgattctcctgcctcagccccctgagtagctgggattacaggtgcatgccaccatgcccagctaattttttgtaagtttagtagagacgggatttcactatgatggccaggcttgtcttgaactcctgaattcaggtgatctgcctgcctcagcctcccaaagtgttgggattactagcatgagccactgcacccagcctcatttatttttgagatagtgtctcactctgtcaaccagcttatttgtattttttgtagagacagaggtttgccatgttgcccaggctgatcttgaacttttgggttcaagtgatcagcccatcttgaacttccaaattcctatgattacatttcattttatttagtagtttaatctatatttaaaatgattggttaaagaaatgaagttgttattaccactaatattgttattgttttatgtgtttctagtagttatatttttctcatttcctgttttacttacttaattttcatttaattttgtactggcatgctttgattatattttattttcttttgcatactttgtataaataatatcttagtaatcatctcaaaaactggagattacatacatcttaaagttaaaacaatatattttaatctcataacaacttcaattgaataaaaactatgcctctatattttccagtttgttattgatataaaaattattttatatggtgtatctacaggtgcacgcctgttatcccagcactttgggaggccaaggtgggtggatcccgaggtcaggagatcgagaccatctggccaacatggtgaaatcccatctctactaaaatacaaaaaattagccaggcatggtggcccatgcctgtagtacgagctactcaggaggttgaggcaggggaatcactagaacccaggaggcactccagcctgggagacagagtgagactccatctcaaaatatatatatatttccaaatattcagtttggtcttattatattgacattgttatgcaacatatcactagagtgttttttatcttgcaaagctaaatctcagtacacagtaaataactaccaatcctttgtattttgtggttcttttcaaacaccactctgttttctgtttctaagagtataactgctttatatatctcatccaatctctgtctttttgcggctgggtcactttattttgcataatgtcatcaatatttatcttaatagttgttacagtattttctgctttttgaaaactgagtgataattcctgtacttttgtgtctactgaatgatttggtgacacaaatttcgattacttttacctagtggcttgcagtaacaatgctacaataattatgtgaaagttaatgtaatatatttgctgcattctgttttattagtctactttttcacctttatactcataccaaattattttaattctgtagctttttgatgtgttttgaaatcagaaatggtattgcctgtaacattgttcctgtttttgaagattgctgggtactttattgtctgtttggattccatatacttttaaatttgttgtttttatttctttgaaaatgctgtgagtcatttgaaagacattgcattaaatctgtagattaaattgagcagtaaagacatcttcaaaatattgtttttcaattgtttgtttttgagatggagttaaatttacctgccttaccagttacatttgtgccattttggtttgtatgtttttgttacatttatatgttcaggaagacattacagcttgtggtattttactatgtcatcttagttatgtagtttgtataattttataggttagatttgtaaagtatatttatctgagtctagcaattgaagtaatgtgtttttattgtttctttcagttatatgttctcattttgcccaagatctttggccagagcagaacataaaagattctttccaaaaagtgatactgagaagatatgaaaaacgtggacatggaaatttacagttaataaaaaggtgtgaaagtgtagatgagtgtaaggtgcacacaggaggttataatggacttaaccagtgtagtacaactacccagagcaaagtatttcaatgtgataaatatgggaaagtctttcataaattttcaaattcaaatagacataatataagacatactgaaaaaaaacctttcaaatgcatagaatgtggcaaagcttttaaccagttctcaacccttataacacataagaaaattcatactggagagaaaccctacatttgtgaagaatgtggcaaagcctttaagtactcctctgcccttaatacacataagagaattcatactggagagaaaccatacaagtgtgataaatgtgacaaagcctttattgcatcctcaacccttagtaaacatgagatcattcatactggaaagaaaccctacaagtgtgaagaatgtggcaaagcttttaaccaatcctcgacacttactaaacataagaaaattcatactggagagaaaccctacaaatgtgaagaatgtggcaaagcttttaaccaatcctcaacacttactaaacataagaaaattcatactggagagaagccctacgtttgtgaagaatgtggcaaagcctttaagtactcccgtatccttactacacataagagaattcatactggagagaaaccatacaagtgtaataaatgtggcaaagcctttattgcatcctcaacccttagtagacatgagttcattcatatgggaaagaaacattacaaatgtgaagaatgtggcaaagccttcatttggtcctcagtcctaactagacataagagagttcatactggagagaagccctacaaatgtgaagaatgtggcaaagcctttaagtactcctctacccttagttcacataagagaagtcatactggagagaaaccctacaaatgtgaagaatgtggcaaagcctttgttgcatcctcaacccttagtaaacatgagatcattcatactggaaagaaaccctacaagtgtgaagaatgtggcaaagcttttaaccagtcctcatcccttactaaacataagaaaattcatactggagagaaaccctacaaatgtgaagaatgtggcaaagcttttaaccagtcctcttcccttactaaacataagaaaattcatactggagagaaaccctacaaatgtgaagaatgtggcaaagcttttaaccagtcctcaacccttattaaacataagaaaattcatactagagagaaaccctacaaatgtgaagaatgtggcaaagcttttcacctatccacacaccttactacacataagatacttcatactggagagaaaccttatagatgtagagaatgtggcaaagcttttaaccattctgcaaccctttcttcacataagaaaatccattctggagagaaaccatacgagtgtgataaatgtggcaaagcctttatttcaccctcaagccttagtagacatgagataattcatactggggagaaaccctagaagtgtgaagaatgtggcaaagccttcaagtggtcctcacaccttactatacactgagagttctgaacttactctgtaaccatcccaaactcctcccaggcacagtctggcagaggtcctgccatttcggagacctggaggaagtggcccatttacagccatgtaggcaggcctgcagaccttggcctttactacggtacctgaagtggttcaatgactcagtttcagttacctgagccacagcttaaggtcagttctgcctatatagaaacccacacagttaacctgaggaaatgctctctggtactcactgaaagccacactcatccacatcctgatacaaggcccaccatatgcagacctgactgccaaaacatgccctagtgtctgccgtacagagtgaagtcctgaaggatatttagtctgtccaaaactaaaatgaagatttcaactccccaaccccctctaacaagccagctaaaggtggactatagtgcagacccagcaaccttgtgaccaggctaaaacccctcatcactacaaattcagagggcatctcatcaccctaagggcccaacgaaagatctttaccttctaacatcagtttatgaaaacttgaaaaggtgtttgctccatcaaattcagacaccagtacaaaactatattatgcccattgtctggttctattttaatgtagcactggaagtgtgtggcagaagaattagtcaaagaaataaaaatagccattgaaattgaagaaaaatgttgctgtttgtagatcatacaatcttatatttgaaaaaccttaaacagtacattaaaacccgtctaaactaataaatacactcagtaaattaacaaaatataaaatcaacatacatgtatatgtatggttttatacacttaaactatctaattaaacagaggaacacactgggcactttggctcacgcctgtaatcccagcactttgggaggccaaggcgggtgaatgatctgaggtcaggagttacagatcagcctggccaacatgttgaaatcccatctctactaaaaatacaaaaattagctgggaatggtggctagcacctgcagtccaagctagtttggaggctgagggaggagaattgcttgaatttgggaggtggaggttgtggtgagcagagatcgtgccattgcactccagcctgggcaacagtgccagactccatctgaaaaagaaaaaaaaaagaaaatcgtatttactatagcattaaataataaatgtctggccaggcctggtggctcatgcctgtaatgtcaaggtgggcggatcacaaggtcaggtgatcgagaccatcttggccgtggtgaaaccccatctcaactaaaatataaaaaattagctgggcatggtggtgcatgtctgtagtttcagctaattaggactgaggcaggagaatcgctagaacccagggaggtggaggtttcagtgaactgagatcatgccactgcactccagcctggagaaagagcaagacactttctcaaaaaataaatacataaatctctgagaaaataaccaaaaaggtaagaaatctttacaataaaaatatcaataaaaaattagagaaaatccaaataaatataaaacattttatctctgggttgaaagtaaatatcattaaagtgccgtattatccaaagttatctacagattcaataaacttcctatcaaaacttgcagtggtatttctttcacaataatggaaaatactattttaaaatttatgtgaaactaaaaatttgaatagccaaagcaatcttgaggaaaaaaaaagcagaaggatatcatacttataatgtcaagctgtatttcaagactgtattctaataaaaaccaaatggattgtgcaaaaaaatgagcaaaaatgcaacagaaactaacacatatttcagacatgatgaaaaaaacttaatagtttatcaaaatcatgcagatatttgtgtgtccccaaaacaatagaaaagcagccagattgtgcagtctcttatataccatgaagaggactttggctctcactgtgaacttgaaggaagttcactgaaagaaaagtagaatccttagagaatttaaaagcataagacagaagatgcccctttgtgagagcaaaatttagaaacaaaaaaaacagctgctcaggaaatatttcctttggaatacaacttccaaattagattttaagaactggttttctctttgactttgagacttcttacctgtgttttccgttgtattcattttcactcatacctacctggggggttggcaatcatctcatgtctcttcagagccaaaggtttttttccctgctccagatgagtgatcaggtctggcttagagacaacaatactgttgtattaagaataaataacatgaatcgtgctcatattctccaattacaagctagtaatgtgttcagtagagaggatgtgataaaatattctagtaaattaattacaaaatactaatctataacaaatttctaaatatttagaaaatgctttcaatttgtaggtttcttaattttactatctaatactactgaatcaaaaattggtggcaattagattttcaggtgggggcaagaatactttgtcactaaatttttggaattaccactaatttagagtgaattatacagctcaaatcaggaatgtggaaagtttggattaagatgaaacatcttgaagagacttttctgcatgagcaaattttgaagattttctgaaaaaaggggatctgaaactcttttatgcaaagaatagattactaaaaagttctacataaaagagaaataaaacctttagggtatattatgaattatgtcttaaagttatcctcaacaagaaagaccatatttccatagttctctaacatcacattcgtatacaacttccgctgtacagtgtccaggcaatgccactcctccagagataattctatggccacatctctaaattgcaatggtccctgaagaacacacacatttttaccaagtggccaggtgtggaatttttaatttgacttaaggtgaaatgagagagtaaagagaagtggttctgacttatagcactgactaaaattatccaataaaataattttcaaaacagaaatattattctctaactatgataaaaaaaaaaaagcaccataagatccagaacaacagttcatatattttatttttctagataataaagtataaaattaagggcatgaacacgaacatgtacatttttgagtgctatatttacatcatacggaatgagttgtgaatatttttcagatggaaaagacattcacttaggcatttctcaaatttattatgtacaataagctgaagaccttatgcaggtttttttttttttccaagaagatctggagtaagtctgatttacgtatttatttccttttcttttttatttgagacggagtttcatgcttgttgcccaggcttctgtgcagtggcatcatcttggctcacggcagtgtccccctcctgggttcaagcaattctcctgcctcagcctcctgagtagttgagattacaggcatgtgcctccacgcccagctatttttgtatttttagtagagacagggtattctccatgttggtcaggctggtctcaaactcccaacctcaggtgatctgcctgccttggcctcccaaaatgctgtgattacaggcatgagccagggctccccgctgattttttgaatttctaacaagcttaccagtaatgctaacgtttttggcctaataaggatattttgtcaaagatccagtaagtggtagagcctgtgttttcccagtttttctagcctgtaaacaaagataagagccttcattttctaaagaaaaatatgtagaaaaaataaaaggagaactgccagattaaatgtgatcacttgtgtagagcagctgcataaagataattatgaagagaaaaatagttatctctacagtgaaaaaaatcaatcagctatttcaccaagtgaatcattaaccattaactgcactaggacaaatttttatgatgtgctactgcacacagaagaacacagcatcactgttgaaatattcctccccaaaacagtaaactagtctgaatttaaccataaacaacagtttatgcaaacttcaaaatacaggtaactcctatgttctgtaatttttagtaggaattttaattaggcttcatttagcaccctagagagcaagtatctcctaataatttttttcagaactttctgggtaataaatgccattccatttaaatcagcattttcttaatcctcttctgcatagagctaatggaacacacagctggagcctcaacattacatgttctccatctttactaagggccacagttttccccaatagaaaccttgagtatccacatctttccatgttcaacagccacaaagggaacatttttaatattgcaggtcataaattcttgcggagcattctgcatggcatataagaagctatgacgtacagaatgtagagaagtctgtgggacataggacagaaacgttttccagagacccttgactatcataagaattttaagaagtagttaaaccaaactccttagggaggaaaaacacaagtagagaagtaaaggtttgtgagtactaaacgcatggcagtccaggaggcagagtggacacagctcttcatctgacacatgtttacctgaagaaaagccatttttttctttctcctcctcctctggaattccttctcagatgagattctctggacaagttacacctgcatatggagaatatgcctttaaaggtgtcagtaccacatttacctgctagtatgacatcaactggcagaaaaagaaaaattcacttactgctgtcttttaaacagaatagattcaggaataatgagctgctccatgaagacaaaaatataagcttctcctttcctgtcctcaggtgccctcccctgccagagactccagcaatttctgctacagtaatggaaatatgcaccacactgacctgtccctaccaaacccaaacagaacaggccctgtgaccaccctttagtgcaaaggtggaacttaactctcgaaaatgtattttgaagccttcatacttgattctggcctcaccttagagtcacatgaggcccttcattaaaacaacatggatccttccacccagaacaataaacagaagctgtggggagggcacaagtataaatcacttggtaattttggtcccacattatgtaaggtgattctgcaggtttgaaaagggtttatgaaagagtgttttaaacaagtctcctgtcaatgctgatgttgctcccccttggctcattattagcattagagaaagcaggcagagcacagggtcccttacacttaacacccttctcacaaccaaatacttgtcgtgcaaataaggacaacccatctccatcctaaagttttatattctttgctggctctttaagtttatagaggaaacagaaggcagcaatgtttgaataagtctgggtttaaaaaacaacatgtacacatgtactactgcaatgtttattaagcaagtactatgtgctcaagagtatgatacagagcactgtgctgggcataacacattatgtgatttaattctcataataccctgggagctagtactaagggtttaggaattttcaggatttagataaagggcccagcatttttattcttctgtttctctgtcatcaaattttttaaaaagttgtaagaaataaaagctaaatatagacagatagaaaagatatagaaaggatgagtttaatgcagtttagagaaaattttattctgtttatgtttacttttttgttacttggggagcaattactggatctgcaggaatagaaaacaagttgctaaatagaatgtctctgcaagcactggttttaatagaaaacttaaaagctaagactctataatacatactttatttttcccattcatctgcttttgggtttcaggaaattgtgagcaccagctctagaaaggcagcaggattcaccagccaaaactcttgatctctactaatcagttctgagagcaagactccagggtatggtcagacctaaataaggccttcaaaaagaatatatgtaaacaagtctggggcagtgtgaggaccctatgtagaattctgttctctatgtcactggggtactaccagatttgtttcttctaaatgtcctaaaagaaacttaaatccaacagtttctgtaatttaaatattttctagccactgccctgtcaactttatactatatactaatatgcaatttaaacaaaccccttaaggttttctagggtaattttattggaaaataaatatcgtacacttaacaagtgaaagaaatagaaattatacagccggatgtggtggctcacgcccataatcccagcactttgggaggctgaggcaggtggatcacgaggtcaggagtacaggaccagcctgatgagatggtgaaacctcgtctctactaaaagtacaaaaatttgccaggtgcagtggcatgtgccagtaatcccagctactcgggaggctgtgtcaggagaatcacttgaacctggacagcagaggttgcagtgagctgagatcatgccactgaactccagcctgggacacagagtgagactccatctggacatcctcaaatgcctcaaagacacctaggtgattgtgagagattcccagtgatctggggctgatggcccaataataagccaggctggagacttaggctgattctacatagaaaatggaagtgccctagtggagctcctgaacctggatcacctgttctgattttctagctcttgaaagaaagaacaaaaatactctactccagtatcacattttacaggtaaatgtagttgtggtcatggctctggatactttggggccttgatctcttactcctaagatgcttatttacactgacagattctgccctcagattctatttccttctggagcctctcacataactgtagcaggtcaatgaacaagatgtgaaaaatctcaaagagccacactcccaaatggaggctatgtctatgtttacatttcacaacgcagaaaatatcttttgtttgtttctgtacattctcaatcaaaagtccggccctgttttgtaaatccaaggcagaggccagaccttattggcagattctaggcaggatccacctggatttgcatcctttggtgttacagaaagtgaagcacaatcaaaggagagatcccctcatagagtctgctctagcacattctaaatgataaatctacatgaaaaaaagagaaaaagctgacacaacatgaatataagtagacactttattttggtcaaacttaagaattataacctgggagcaaagattcaagttgcctggaatctacagtttgattagcagcagttacaagaggatttgtaatgacaacaagagagggacagagagtgggctgatacaaagttgattgttagaaatttttatttatttacagaaataactgattattgatgagatatatattgtatatatatggttatggtttagggtacgggatatagtgtccaatgtggcattattagtttatagctacttggggcaatagtgtacagtttcaagagatgaatacatatttcaaatggggaagacaggcgtaactacacttgcattttaatgtctctctgagtttgataaccaaaggacttgcattttccagataaaagttttttatttcccaaatctcaagacctggattcaaaatttggagctgcagatttagaacctgaacggctggagtagcagcgggtgttaactgcagatttgtgagcatttcagcaagaggaggaaggggaaagtggagattctgtctacatgtctactcaatgcacacatgttactctgattgggtttttgggccccgtggtgtctgaatcagtttcaggtatgaagatacaatgattgattggtgccccgtggagtttgtagaaatctggacctaacctctctagaagtgactgtagaggattatagataccatataggcagagacacaattctgcctgcatatttaggggacagtgtgcactttgtagcacaggtgtgagttgactggaagtctgagagggaaagtcccctctagagtaaattctggttttcaccttatgtgtttatatcatgtctgctaattctagaccatgcttggaaacaataattaaaagaaaaattttctccagcctcagagaaactccacaataataagatagaaagaaaacattttattacacaattgaacttgaatgtgacatgcatcatagtcaatctgcttaagagactgcaaagacagaaggatggtcaccaaaattagtccacaagtagaagaatttccagcaccatgtcatacataattcatcctaaattcatctggagattgaagaggccatctgtgtatgctaattgcttatattcaatgacaaataaacttttcccatcttcatagcaggaggtagcttagcagcttgaagccaggtgcctgctgaaggtaagatttcactctgctacaaaaatggttgaatagggttctatcttgatttggctatttacattttagagcagtgtctctgcactccctggcactgggctacagcactcctgcttgctttctcctggttactagtgtcctctgttgacttctacaatttgctactgaggcacagcccagagcacagctcacattttatgtgaaccccatttgccacagcagcactctagtgtcacatcagagagtgaggcctgagctgcaggaggagagcctgcaggcctcatgggtagatttacaccttcacaataatgggaatgtaagcagtgtttcagccccagtttctatttataatggtgaaatggaaaaaatactaccgaattcccaggatgagtccagatacccttaccctgaatactctgcagctgcattcctaagcccttatctaggtgccacagtagaatttgcagtcatggtacagcatgcaaaccctaattacagccatatgggcagcatgggggaggtcataggaaatatgaacaaaccttaattacacattcctgtgaactcctgtttttcagctagctgccgccataaatgtcacatgatgaggtgttgcaagttcatggtaaactgataaactgcctttgtgcctgttcctaactgataaactatctagcggcaaagttaactcccttaagcccctctcatctcacataaacccctcactttgtaagctcagggctacctcttctgattgctgtggaccagcccggtaggttaataaacttacttgcctgactttgggtctacttgtcctttctctcggccaaccttacattttggtgtcaaaacctgggaagaggtagactctggccgggcgtccctagaggactttctgtcactctctctctcacactctccctcctcccaggcttgctggtcattgtgcgctggagcctaggtgcctttccccctctcctgccaccccctgctagccaccctccccttcccaaacctgctgaaggcccaaaggatctcctagactctcccattgttggtgacttcattcaccttcagagcctccaaaggggtaagagagagagtcttgccatttacccggaacccttgactgtctctgcattcccaaaagacccagcgctgagccaagggctttcttcagcctccagtcctctggtttctccatttcaggaggcagctacctcctacattccggacagggcttgtgggacaggggacgccctcacctgccatccttgtcaactggcagtctcttcttcctctacccccctcctctatttaccatgggagcttctcattctacccctcctaaaaccaccccccttgggtatcttttgcacaacctcaatgctctcagcctccattcaagggtccatcctaagaggcttattttctaccgtaatactgcctggcctcaatacaaattggacaatggctcccaatcacccgaaaatggcacttttgatttcaacatgcttacagacttagacaacttttgccaccgcaatgggaaatggtctgagattccttatgttcaggctttcttcactctccatagccacccttctctctgccagtcctgttctactttccaaatcctccttgcctgctctaaacctgatttgcctcctaccaccctccctacgaccccagccgacgactcatcccctactaccctccccatcgccccagctgatgactcctcttcctttgaccccaccaattttccccctccccgtcaacatcatgatcctctgccagagcatcatgatcctcctccgtatgcccccgctctggctctacttctttctccccctctctccaacaaccctccttctgactctgagtcctccccatcaccaccccttacccactctcaggccaagcagccagttcccttgttgcccctttgggaagcagcaggggccaaagggatcgtctgtgtccacatccccttctccctttccgatctcttccaagttgaaaaatgtctcggatttttctcctccgatcctgatacctatatcaaagaatgtacgtatcttactcagtcttatgaactcacttggcatgatctctatattatcctgtcttttaccctccttctggaaaagaaggaaagagtgtggctcgcagccccgacgcgtgctgatgatctccatcagcaagattttaccaagcccataggagccgctgcagtaccctggcaggagcctccttgggagtaccaacccacagaccccagcctggcatcccataatcatatgattacttgcctcattgcaggcctaaacaaggctgcccacgaggctgtaaactttaaaaagctcaaagaaatctcccaaaagatcaatgaaaaccttgcccaattttttttcctgtcttatggaggctctccaaaaatatacccatgttgatcctgcctcctgagaaggtgctattgttcttcatacccattttatcttccaatctgcccccaatatttggcacaaacttaaaaaggctgaagatggccctgaaacccccaacaagacctccctaatctggctttcaaagtcttcaataacagggatgagcaaaataaattagataaagcctaaagagatcttgctaaataccagcttctagcagtggctatctgccaacctcgccatagtacccaagggcacaaaacacccaatagcattaactctcccaggccttttttaaagtgaagcaaagaaggccactgggcatgagcatgccctaatccatgaatgccaaaaagcccttgcccagtctgccagcagacaggccactggaagtctgactgtcctgttaacaggcagacagaaaagcctgtactgcaaaaccaccacccttttggagagacaaaaggtgaagtatcacttgcattcccacagctccttagtctagccactgaagactgacgaggcccagggcccctggccccatctaccttcactgcatcagagcccagggtaactctactagcagcaggtaagccgatctcttttttaaatcaatactggggccacctactcaactatgcctgaattctcaggaccaactcatccctcccaggtctcagttgtaggggttaatggactcatctcgagtccacgcaccaccaagcctcttacctgttccctatttcataccgttttctcacacccttttcttatcatgccctgttaccctaaccccatcctaggcagaaacctcctaaccaaattaaaggcttccattaccttcctctgttccccacaaccagactctcacctactcctttctgctactgaaccagccctgggcccctctccccagtatccactctcctcttctctggttaatacaatagtgtgggatactactaccccttccctagctacacaccacgatcctatcaaaatccagctaaaagacgcctccaaattccctaacatctctcaatatcccatctcagtagctcatcaaaaaggcttacagcccatcataaacaaactccttttgcgcagccttctcagtccaactcattctccatataatacccccataattcctgttaagaaggcaaatggctcctatcaactagtccaagacctctaggctatcaatcaggcagtccttcccatccacccaatagttcccaacccttatacactcctttcccttatcccttccaacacaacctactacactgccattgatctgaaagatgccttttttgctattccctttcaccctgactcccgagatcttcttactttcacctggactgaccctgaaaccctccagtctcaacaacttacttggaaagtcctccctcaaggctttagagatagtccccatttctttgggcaagctctggcccaagacctcacatcgctaaacctctccccttgctggctccttcagtatgtggatgacctcctcctctgcagcccctccctaaaagactctcaaacccacactactgcccttctaaacttccttgctgataaagaatatagggtttccccctctaaggcacaactctccaccccaacagtaacttaggagtccaactctccctcagagcccaagccatgaccccagcacgggagatagacagtctacgtccacccttctccaaaagagaaatcctttctttcttagaactagcaagatccctaattttgccctcctagcctgccctctttatgaggcagccaaaggccctccaaatgagcccctaaatccttcacacaacataatccccagcttcctcaaactaaaggcagctcttgtaactgcttctgctctatctttgcccaacatctctcagcctttcaccctctacacagctgaaaaccatggaatagcccttggcgtcctcggtcaacaaaaaggaagtcctccttccttcactcctatagcttacctttctaaacaactaaacaacaccatctgaggatggccagcctgcctcagagtcctagcagcagccaccatgctagctttagaaagcaaaaagctaacattcagccaagacatcaccatatatagcccacataatctacaagatcttctctcctcccaagtactgagcaccttttctccttcccacatccaactactccatgctctttttcttgagaatcctgaattctgcctctccaaaaatgctcccctcagtcctgcatctctacctccagtgtcttcctcttctcccatccactcctgtactgaaatccttgatcacctgctgcatcattttcccaatatctccccggaacctcttcttgatcctgatgaccagttatttatagatggctcctcctccaagtccgtcaattccaataaaattgctggatatgcttgacagagtagttaaagctaagcccctaccccctggaacctcctcccaaaaggcagaactcatagctctcactagggccctaaccctctcaaaaggcaaacgggtcaacatttttacagactctaattataccgatcacattcttcattctcgcaccaccatctggcagaaaagagattccttactgccaaaggaacccccgttaaaaacggcccccttatttaccagctcctccaggctgcatgcctcccaacttaggcaggggttatatactgtcagggacgtgaaacagtatgagacaaaatatcaaaaagggaatagaaaagccaacgaggctgcaaaagaagcctccctctcatcagcccctgcccctgtcctccttgttaccccagcaatccaacccaggtactcccccaccaagaaggctttgctactacagcaagaagcctcctttcaaggggactggataatcaaaagtcaaaagctcatcctcccccaagaacaaaccaaataaattctaacatctcttcaccaatccttccatatcggtgcacacttcctgtacctactcctttgcccttatttctcctccccccacctattcatctcactaagacacataacctcaaactgtcatatatgctctgttacttcctcccaaggggccctccgctctcctcctattcctacacatcagctcagaggaacactcccagaggaggactgacaggtagacttcacccacatgcctcccgtcaagaagacaaaatttcttcttactcttatagacaccttctctgggtgggtagaggcattacgtacctcttcagaaaaggccgcagtagtctctcaaatccttacaacagaaatcatccctatatttggtctccctcactccatacaatcagacaatggccctagcttcatctcccagatcatccaacaggtttttcagtcccttggcgtccagaggtgcttccgtatcccataatggccccagtcatccagaaaagtcagaagggcaaatgggatccttcaggctcagttaaccaaactcaagcttaaagtccaaaaaccatggacctcccttttgcccatagcactggcctgcatcagagcaagtccgaaatcacccttcttccttagcccatttgagttaatgtatggacgccctttcctcttacaaaacaggcctcctctcgactcccagctaggagaatatctcccaaccttctcccttatccgtcatctcctctgtgaatgatcaagccctcccaaaaccccacaaaggccccactgactggactctcctaccaggaaagtatgtcttcctaaaaactcttaacccaacaaggctaaaaccaaggtgggaaggcccttttcaaattatccttacaacccccactgcagccaaactcaggacatgcctcttggtaccatctttccagagtaaaaagggctcctgcagtgcctactgaaccacagactgtcctccaccaatcctccagcaccctcctttgtccaaccaaactctgcctgacgcccatccctgaagaaggcccacgagcggtaactcttttacatatcacttctgcccctgctacagatgccaaggtcctcgtgacaaggaacagcctcaccctacagcataccaaatattagaatccctctcttctctccccatttccacatgaggaaaagtcttaacccacctataccttgcccatctgcaaggagaatttgaccatccatgggacgctatcagccacctcatagaccccctagaagaagccacctccctgtatggatcctaccagctcctctctccaacaacagattctgattcttcctcagattcctaattcttttgacagccagccccatggcctctacctcctcagggtcccttctcacttctacaagtctcgaatgatctctcaacctcactcactttttgttactgtgctccaattcaacatttgcttccagtttctggacctatttttgcctttcctctactgcctactcagctatcccaatttcttagccctgagaccattttcccattcacttctcttacaacatccaaaagggacctgcctttgtagacagagccctcactctcactggaaactatcccactgccctcactgacagagctaccaagctcctcttcaatctatattgccaactatgatgactcaaaactcccataccccaccatccaaggtctcataactctccataccacaagacttggccaagcccccttatgcatcacctcttccaatggacacgtacacgtaggcaccctccttccctctgcctgtaactcaacccgaaccatctctcacccttcctcccatatctcactctgagtggattattcagtctcccctgaagtcaacggtctctttactcagcccttctgcatttcctccctcccacctctcaaacatggaaaccccttccttggacaggagtgctcaaaggggtttctgtctctttctcactctgggttgctgaagctgagccaagtccctccaagtggggaacctacaaactgcaacacctactctcaatccacctgtctgtttgcataaatacctcaggcatcttctttctctgcgggtccacaacatacttctgtctccttactaactggacaggcacttgcgccctagtctgccttactcccaacattaacattgtcctttcaaaccaggaactccctgttccagctacaatacatacccactcaaaaagaacaatacagttgattccctattcacaatagcaaagacatggacaggccctaaatgcctatcaatggataaaggaaacacggtatggtcagacgcggtggctcatgcctgtaatcccagcactctgggaggctgaggcaggtggattgcctgagcttagaagtttgagaccagcctgggcaacagggcaaaatcctgtctccatgcaaaatacaaaaatagaaattggccaggtgtggtaaagcacatgtgtagtccccccacaccaagtacttaggaggatgaggtaggagacaattgcttgagcctgggaggttgaggctaaagtaagccaatatcatgctatgacactctagcctgggccataagtgtgaccctgtctccaaaaataaaataaaataaaagatttagtaaaaacaaaatatggtacataaacatcgtggaatactctgtggccattaaaaaaagtgatcatgtcctttgcaaaaacatcagtgaacctggagaccactattcttagaaaactaacggagagcctgggcatggtggcttgtgcctgtaatcccagcgctttgggagggaggtgggcaaatcacctgcagtcgggagtttgagaccagcctgaccaacatggaaaaagcccatcactactaaaaatacaaaattagcagggcatggtggcatgcacctctaatcccagctactagggaggctgaggcaggagaatcgcttgaacctgggagacgaaggttgcagtgagccaagattgcaccattgcactccagtctgggcaaaaagagtaaaactccatctcaaaaaacaaaacaaaaaacaacaaaaaaagagaaaactaatacagaaacagaaaaccaaatgcatgttattatttataagtaatagctaaataataagaacacatgaacacaaagagaagaacaacagacactgaggcctagatgagggtggagggtgggaggactaagaggatgagaaaacagacctgtttggtgctacgggtagtacctcagtgacaaaataatctgcacaccaaacccccatgacataattttagctgtaaaacaaagacacatgtatatcccgaaccaaaaataaaagctaaaagaaaaaatatccctggatggcagagtgcaatgtagctgaaaggactgattttcactacagatagtggcccaggtggggctgtactgatttatttctgtgtgaatgcaggcagatgagatcatgaacaggtggcccagaagcttaggttggtggagaaaacaagttgctgctgcagattcagtgtctgagggtggggatatgccagaagacttgtagacacttgtgggttcttggcaagaaacactaggatcaaaaatgcagtggtgaagttcctgagggtggtgcctagtcctgggaggagtgtggacacatcaatgtctagtgtgtgtgtgtttgtgagtgggtggaaatcctgtggtggcagatgcaagacaggggtgtctgttcttagaggtccttttctctaagttttcagtcttctgtcaccctgggagaagacctggaatcacaggaaaatgggcagtgtgacagcctgtgtacaggagagcagagcctcccatttccagaaacccagagttttactccaggccaggcctccataatatctttttttctggcaccaaatctgtagtttgctgaacatcaaactatcctccaacaccaactcattgtctaacatttgaattctgacaccacccagagtcagcacagaccctgattcagggctcggtcccacaacactgtcctcactgcagatgccagccacaaaccccacaggcccatctatgcttcggagccactatttaaaaactggggactcccatcgcctccctgaagttcaataatttggtagagctactcgcagaactcaggaaaacactgtagttatgtttactgttttaatatataagatgcagcccaggaaaagccaagtggaagaaatgcatagaacaaagaaaagagatgggggaagatgaaacacatagataatcctggaaaatatttgtgattaataaaattctccatcctttgtgtgctccaggaacagtttatggaaagaaacactcttcccattatgacttagatagtcctctgttttacctatcacacagccagacacacactctgcagattttctcctttttctcattagaaaaatcagctgaatttgtcttcagtgatcaaaattattatttttttttaatggagtctcgctttgttgcctaggctggagtacagtggcttgatctcggctcactgcaatggctgcctcctgggttcaaccaattctccttcctcagcctcccgagcatctgggattacaggtgcccactgtgacacctggctaatttttgtgtttttagtagacacaaggtttcaccatattggccaggctggtctcgaactcctgacctcaggtgatccgcctgccttggcctcccaaagtgctgggattacaggcatgagccacctcacttggcctaaaataaaatatttcttaatcaaatttaagcttatatccctcccttaggctcctgaactttgagctaccctcagtctgagtcaacatacaaccccattttatgtccctcctaagagcatgctgatttcagggtaacacattctctgatctaaaatctgactttttcaccctccatttgccattcccctcccacctactttctaatcttgtttgctcctccctaggaaagaaagcccttttcagcctacatctttgcaagccacaaagaccttccttatagttagttggtacttcctcctgttgcaataattttttggaattttttttacataaatctaacatttttattttacacagtctaaaaaatgcctcaaaacagtaacaacttcatcatcagtaagaacctcccagtttcctttcaccttaatcttaactgcatctgcctgtggggccccagctttccagggctctgtagcttctctcagaataaaggatccttccatggctggggtgagcaggctgggacatctgcagtggagactccccagaaaaaagtaactgggcctttaataaccttctgttggccgggctcggtggctcatgcctgtaatcacagcactttgggaggtcgaggtgggcggatcacctaaggtcgggagttcgagaccagcctgaccaacatggacaaatcccgtctctactaaaaacacaaaattagccgggcgtgatggtgcatgcctgtaattccagctactccagaggttgaagtaggagaattgctttaacctgggaggcagaggctgtggtgagccagatcacaccattgcactccagcctgggtgcacagacacacacacacacacacacacacacacacacacaccaaaaacaaaaaacaaaacaaaacaaacaaccctctgttgcaggcttaatattagccttagcttggaatcactaggttcaagctttaatttccatgtcagagttattcactttgtttttgaaagtaagtgtttgaaaattccagtgaaattactcaaacacagtgtttatataagggaaggaaattttaagatgcttactttttttttttttttgagatggagtcttgctctgttgactgggctgaagtgcaatggcatgatctcagctcactgcaacctaagtttcctgggttcaagcaattgttgtgcctcagcctcttaagtagctgggattacaggtgcttgccaccatatccagctaatttttgtatttttagtagagactcagtttcaccatgttgaccaggctggtctacaactcctgaactcatgatccactcgcctcagcctctcagagtgctgagattacaggcgtgagcctccggggatccgacgcacaatcccggttggcttacccttaaactttttccaaatagggtaaactcgtgattttgcgagaaaaggagaaggggaaagaagaagggatagggttgatttacagcttttacaacttatgaccaggaagttgtctttgaagaggaacttcgttgtcccaacaactccttacctcaagtgatccacccaccttggcctcccaaaatgctgggattacaggcgtaagccacctaggctcgccccataaatttttaataggagaaaagagaaactgtcaaccccatggtccaaagctcttcccattcatggacccgcaccccgagtcaggattctcccctgaccaccctcccgtggtccctgcacaatctgggagagacgccacactgcaggcgcagagctgcccagacagggctccaggccagggcacagtcgctgcacagggaagaggcaggacacccaggtgtggggaaaaggaagagagatcagatcgttactgtgactatgtagaaaaaggaagacaaaataaactccattttgatctctagtaagaaaaattgttctgccttgagatgctgttaatctgtaactttcgtccctaccctgtgctcacaaaaacatgtgctgtgtagactcaaggtttaatggatctagggctgtgcaggatgtgctttgttaaaaatgtgattgcacgcagaatgcttggtgaaagtcatcgccattctccattctctattaaccagagacacaatgcactgcggaaggccgcagggacccctgcccaagaaagcctgggtattacacaggtttccactgactgagatagcctgagatatggcctcatgggaagggaaagaccttacagcccccaagcccaacaccagtaaagggtctgtgctgaggaggattagtgaagaggaaggcctctatgcggttaagaggaaggcatctgtctcctgcatgcctctgggaatggaatgacttggtgtaaaaccgaccatacattctattctgagacagaagaaaactgccatatggctggaggcgagacatggtggcggcaatactgctctgctactttttaccacaatgagatgtttatgtaaagttaaacataaatctagcctacgtgcacatccaggcacagcaccttcccttaaacttatatatgacacagagtctttcgcttacgtttttctgctgaccctctccccacattcaccctatagttatgccacattcccctcgccgagatagtaaagatagtgatcaataaatactgagggaactcagagaccagcgcgggcgcaggtcctcacttgctgagcgccatccactgggcccacttttcttcctctgtactttgtctccatgtcttatttcttttctcagtctctcatctccaccttgcgagaaatacccatgggtgtagaggggcaggcccccttcacccgggattctggctgtcagcacagctgccgtcttatggctgaaggggactgaggccaagctgggcaaggagaactcgggcgcagattgtggagattactgtggggaggcctgagtcccgccacagccacatcaccccggttccaactagcccctccctcactctcaggatgtcggactggcactgtcactgtttctaggcttccagggggtcctggagtcttagctgtggatctcccaaaacctgcaggtcagagggacacagagcctgggcctctaggagcagacgacacagagtagtgaagaccagacctggagctcccgctgcagcgagagacaaaggccccaccaaacccagaagtcgtcctgttcgcttcagcttcatgcctgatttgaggatttcctgcccagcgtccctgactggataatgcttaaggctccgccccttcaggccctgagtgacagaagatgtcatcagatgctgggctgagtgaagaaagactgacaacctaagctgcagccttttcaggcagggtttcctccctgagctgagccaagcccaccccagagcttggggaaattctctctcttctttactctctctttttgaatttattcaaaaggtgaacagaagtattttgctttcatattaataatacataaaatttttgttcaagagaaaatcaacttttactttggtagtagtgtattttgaatactaaagctaattttaataaaccttataaataaatcaaatttgtcatttttgacctctcaagatttacatatatattttgtaatctcttgtaattttttaaattttttctattttgtttttacctatattctttttattatttcaattcaaaacaacctttaagtaatttcaaactgttataggagatagaaagaagtcatttagggccagccacggtgactcacgcctgtaatcccaacactttgggaggccaaggtggacagatcacttgaggtcaggagtttgagacgagcctggccaacatggtgaaaccccatctctaccaaaaatacaaaaaattacccaggcgtggtggtgcacacctgtagtcccagctactctggaggatgaggcaggagaatcaattgaacccaggaggcagaggttgtgtaatggcccaaggagttcaccttgccctttgcctagacagagccaattaatcaagatgggggaatttgtggaggaaaagttaaatattaaatttgaacttaattgaacatggacacaaacaatagtcaacaagtcatggaacaggttgtgtgagccccttgaggcattcatccagcgctgttttggagaaatctctattttaatctattcctatacattagttattgaaaaacaatagacaatcgcaaaaaaagttgatcttcttgtgtttcttgagcccagtcgtgaagggccctcgtgactgggcctcatgccaaacaactcgttacaaaaagagctaggatcccagactgcaccgaagttttgtgagacctctccttgtctgtgcacggatggctggatgactctggagcccaagctgttgcttcccagtctggtggtgaaccctccatagtccgatgagtgtggtgtccaactctggagcccagcctgttgcttcctggtctggtggtgagtctccatagtctggtgtggaggcaaatttgaatattaaatttgaactaattgaatgtggacacaaacaatggtcaccaagtcctggcacaggttgtgtgagcccattcaggggttcatccagtgctgtttaggagaaatctctatttcaatctattcctatacattcgttattgagaaacaatagacaatcacaaaaacaagttgacctttttgtgttccttgagcccagtcgtgaagggccctcatgactaagccccatgccaaaaaacttgttacaaaagagctagggtcccagactgcactgaagattcatgagagctctcctcttctgtgcacagatgagtggccgactctggagcccaggttgtttcttcccagtctggtggtgaatcctccatagcctggtgagtgtaaatatatatatatctcttttccattctcctcttcccatcacaatttgcttattatatcaatctgcttattatattgatttgcctattatatcatttgcccattatatcatttgtttattatatctgtgtagggtccagccccatagggttggtgggtttttctccctgtgtgcagagatgagagagtgtagaaataaagacacaagacgaagagataaaagaaaagacagctgggcccgggggacaactactaccaagatgcagagaccggtagtggccccgaatgccaggctgcactgatatttattggatacaagacaaaggggcagggtaaggagtgtgagccatctccaatgataggtaaggtcataagaatcacgtgtcctttggacagggggcgctttcctgcctggcagccaaggcagagagagagaggtgagagagagacagcttatgccattatttctgcttatcagagacttttagtactttcactaatttgctactgttatctaaaaggcagagccaggtgtacaggatggaacctgaaagcagactaggagcgtgaccactgaagcacagcatcacagggagacggttaggcctccagacaactgcaggcaggcctgactgatgtcaggccctccacaagaggtggaggagtagagtcttctctaaactcccgcagggaaagggagactccctttcccagtctgctaagtagcaggtgtttttccttgacactgactttaccgctagaccatggtccgctcggcaacgggcatcttcccagatgctggcgttacccgctagaccaaggagccctctggtggccttgtctgggcataacagaaggctcacacttgtcttctggtcacttctcactatgtcccctcagctcctatctctgtatggcctggtttttcctaggttatgattgtagagtgaggattactataatattggaataaagaataattgctataaactaatgattaatgatattcatatataatcatatctaagatctatatctagtataactattcttattttatatattttattatactggaacagctcgtgccatcagtctcttgccttggcacctgggtggcttgccacccacatatctgcattgccatttatgtggtataaggcttgttacccttaaaagtattgtgtgtatcttttcttctcctcttgcatgtttcccacccagaacatttttggtgtcacaaacaggatttgaaaacaaaaggtgcaggttttggccagaaggacagggctggaggcttggggacttcccatatatcgggatgggaactccaccagttctcccccatggcaaccgaatggtcaaggggaactggcctttgtgggaattgagaattaaattagtgcaatttaaacctttgactgtgcgggaagtgctgcaggagattccagtcagcaaaggagatgctgagggatcccctggagtcgatggtgtttgcttactgctaataaattaatgtatcaagagaggggctggttgctacaagatattttaagttggaaaagaaaaatgctagtgtgatttccagactggccctggcccaatgccaggcctatatcttgactgatcaggctcaaagctatcaccctattactgaaaaaagcagccgtccgaatggctcggttaggttaaaactgaagagctagtttgctggggcttggagcaggtaaaaacccagctcctacctccaggatgggaaattaaacttagtaaaattcaaggacctgcataaactgtaaaattccttggcatcctatggaatgcagagatatagtccattttacaaaaggctaaggctaaaatattagaatttgcaaaccctactacttaaaaggaggcccagacatttattggctggtttagattctggagacatcatattccccacttgggtaacattttacaacctctgcatgcagccactagaaaacgctatgactttcactggggaaagaaggagaacatggcttctgaacaagctaaatgagtgggtcaactggccctggatctatggcccatacaggatgggccaggagaactgcaagtaactgtcctagatcaaaatgctaattggagccttaggcagaaacaaggtgggaagagggtacctttcaggttttggacccagaaactgccagaggccggaaaagcttatacccctttcaagaagcaattgttagcttcttattgggctttgctggaaacagaacacctctgcttcaaccatgatgtctttatgaggcccgaaactcctattatgacttggctcatgagttcccccaaaacccaccagatagggcatgcccaagaaggagcatcataaaatggacgtggtacatacaagaccaggctaagccaaaaccaaagtgggtatcacttttacatgaggatgcacaaaacctgccagctcaggaaatcatggagcaagtcctgcaggtagggaaggaaatcccctcactcccacccagtggggcaaatcctttgaagaactaagcccagaggatcagaaacatgcttgatttacagacggatccgccaaatacattggtgggacctgatgctggaaggctgtggcttataatcctgttaaaaacataaaaatttctgatgaaggaaggggtgggagcagcgagttagctgaactagtagccatccttcaagctattcaggaggaaggcagagggatttctcacttgtataccaaatcttggtcagtaccaaatggtctttctacctggaagccccaatgacaatgaaacaaatggttaattcagaataaagaggtttggggacaacaatacttggaagatatctcaatccattgcacactgccattatcactgtttcactgttatcactgtttcaacaaggtttcaccatgttggccaggatggtctcgatctcctgatctcgtgatccgcccacctcagcctcccaaagtgctgggattacaggcgtcagccaccatgtgggggaaagaaagagagatcagactgttactgtgtctatgtagaaaaaggaagacataagaaactccattttgatctgtactaagaaaaattcttctgtcttaagatactgttaatctgtaaccccagccccaaccctgtgcccgcagaaacatgtgctgtattgactcaagatttaatgtatttagggctgtacaggatgtgctttgttaaaaatgtctttgcagacagtatgcttggtaaaagtcatcgccattctccagtctcccgtacccagggacacaatgcactgcggaaagccgcagggacctcatgcccaagaaagcctgggtatcgtccaaggtttccccccactgagacagcctgagatatggcctcatgggaagggaaagacctgaccatcccccagcccgacacccataaagggtctgtgctgaggaggattagtgaaagaggaaggcctctttgcagttgagataagaggaaggtatctgtctcctgctcatcgctgggaatggaatgtctcggtgtaaaacctgatcatacattctatttactgagataggagaaaatcaccttatggctggaggtgagacatgctggcgacaatactgctctttacgacactgagatgtttgtgtaaagtcaaacataaatctgtcctacgtgcacatcaaggcacagcacctttccttaaacttatttatgacacaaagtcctttgctcacatgttttcctgctgaccctctccccaccattaccctgtagtcgtaccacatccccctcactgagatgaaagagatagtgatcaataaatactgagggaacttagagaccagtgccgggtgcgggtcctccgtatgctgagcgccggtcccctgggtccacctttcttcctctatactttgtctctgtgtcttatttcttttctcagtctctcatctccaccttgtgagaaacacccacaggtgtggaggggcaggcccccttcaccaccatgtgcagccctgttttccatgttgatgcccatgcatctctgctttctcttgacaggctatttaatcagcaggaagaaaaacaggccacaatttccaccataacagtaaacttgaatgtggatgaatagattacaatgtgttcaagccttgcaaagagaggcattatagtgtatggtggtgtaattgatagtgattaccagggagagttaaaggtcattttatacaataacactccagattcttttgctataaaactagatgctggttactcaatttttagtggtacccttgtcaacaattaactcctgaggaaatctctgccccaacagagtctacatacagaactgggggattcagatcccctggtacaggtagcttaaatcctggagccaaaatatgcatacagcgtccatcacatcttgaccctaaggctggtgaccttgtagctatgaaagcgggaaatgaaggcatagtacaatttcctaaagatgaaaaataaatcatgttccactccatttttgttattacagggaataacctatctactaatggtcagcacctgtgtctttgtgtctgaagccaagaataaattcatcacctgggtagccaccgctgcaactgaagccatccacagtcaatgttggctatatgttgagttgccggaggctgcctgggatgggctatcttgaagaatcgtccctgacaacatttctgaatggctatattgttaccagtagggccacaacaacaacaacacttgcaatccaacctgggcttcctttcaccacactaagcaatctatctttgccaggtcagacaaaagatgaactccaccctcaccttgcatcaaaagtcttgatatcttgcccaataatcctggaacaatatacactgaaaacctgctgtgctggtggctggattccatacaggcttcgctttttctggaggccttaaatggctcctctaatgtttctttggggtttcttcagacatttgtcaacacatactccaaatcaacaacactgccccccaatgaaccacaatctctttcctattttaataacacattagtacactatgattacagtagctccattgctgtcccctggggggccctctgggtatgcagatcctatgggttgcaatactgtccctgcattggatgggaagatgcacttgagggtggacattaattccattcactatccgggataatattcccttccccagtaatctagatgcttacaaacaccactggttacaaatgtgctggtctccctggtggtggtaccctatcacagtattctcccctgccaccagtacattcctccttcaccaacacattaaaatatttaccttacatgtagaaaaagctcttaatgatagtagcactgaacttgtgttgttatcagatgaatttgctcagctgcgtactattgtgttgcaaaatcaaatggcattaaaaatgcttaccgcagcccaaggaggggtttgcacgttactgcaaactgaatgttgtgtgtatatctctggtaattctcacaatatgactctccttggaaagccatgctgagtgtggtttttattaattgtgcttttaattctcctgtgttaccctgtatctgtaatctatatcaattatgccttttccatgtatctgagagggtattttcctacaattgagtatccaattgaggccaaatgtggagggaaagttaaatattaaatttgaactaaattgaatgtggacacaaataatggtcaccaagtcctggcagaggttgtgtgagccccttgaggcgttcatccagtgctgtttcagaaaaaaatctttatttcaatctattcctatacgttagaaattgaaaaacaataggcaatcccaaaaacaagttggcctttttgtgttccttgagcccagtcacaaagggcccttgtgactgagcctcatgccaaacaacttgttacaaaaagagctagggtccaagaccgcaccaaggcttcaagagacctctcctcgtttgtgcatggacgggtgaccgcctccggagcccaggctgtttcttcctgctgtggtgacaaatcctccatagtatggtgagtgcggtgtctgactctggagcccaggctgtcacttccctgtctggtgacaaatcctccatagtctgatgagtgtaaatatatatacatgttttttcccttctccccttcccattgcaatttgcttattatatcaatttgcttattatatgtgcatggccatttacatggaataaagcttgtttacccttaacggtattgtgtatgtgtcttttcttctcccctcatgcatttcctacacagaacaccatatttctcagaggctttgtttgctccttttaattcttttttctgtaaacttgtctgcatgcctcatttcggcaaggtggtcttcaaactctgatatcctttcttctgcttggtcaatttggctattgatactttcgtatgcttcacgaagtttttgtgttgtgtttttcaactccatcaggtcatttatgttcctctttaaactggttactctatttagcagttcctctaaccttttatcaaggttcttaacttctttgcattgggttagaacatgtttctttagctcagcggagtgtgctgtcacacatcttctgaagcctacttctgtcacttcgtccatctcatcctctgtccagttctgcacccttgctgaagagacattgtgatcatttggaggagaagaggcacttgggcctttcaggggtttttgttgattctttctcatcttcatgagtttgtctagtttccatctttgagactgctgacacttggatgagtttttttgttctgttttgttttgttttgaaatagagtctcactctgtcacccagtatggagtgcagtggcacaatcttggctcactgcaacctccgcctcccaggttcaattgattctcatgtctcaggctcccaagtagctgggactacaggcatgcaccaccacggcagtctaagttttgcattttttagtataggcagggtttcactatattggccaggctggtctcgaattgctgacctcaagcaatctgcctgcctcggtctcccaaagtgttgggattacaggtgtgagccaccacgcccagccttggatggggtttttgtgggtatgcttttgttgttgatgctgttgttgtttcttcctgtttgtttgtttttctttcaatagtcaggtccctcttctgtagggctgctgcagtttgctggggggtcacttcaggccctattcatctgtttcactcctgtacctggagatgtcactcaagaagtttcgagaacaacaaagaagggtgcctgctcctttctctgggatctctgaactcaagaggcaccaacctgataccagtaggatcgctcctgtatagagtgtctgacaacccctgctgaagggtcacacccagttgggtggcatggggagcaaaacccattaaatgaagcactttgactgttccttggtggaggaggggctttttgctagggaaaatcccactcgtctgggctgcccgaattcctcagagcaagcaggaggaaaggctaagtctgctgattcacagaggatgcagcctcttctccccctaggggctcaggcccagggagatcacagttctgtccctgagcccctggctggagctgttggagttcctgctgggaggccctgcccagtgaggagggatgggtgagggtcaggcctgaagagacattctggctgcagtcagccacagccggtgtgttgggctgtgggggacacctcttgagaccaagctgtccagcctccctggctctagcaggggaaaagtgtggtcaggagctatagatatggctgctgcctttccccacccagggatcttagcctgttaggcagttgtgagtccccgtgctggctgctgtccctcccccaaggagctcaaacagcttagacagcagcaagccacagctgtggtgctggtcgtccctccactgggaacttagcaggcttaagcagattctagctgagaggctgttgagaatctgctcagctccagggttgtgtcaggcacagtaagttcctcttcaaagggtaacttccttgttctttgttctcaaattcaacttccttgtaccttcctgctcctaactacctgctcttcctgccagtaaacaactcttccagccagtcccaatctgtaacccacatctcttcttatttggaagaagtcctcctcactcctagttacctgctctgtaaacaaacttcccgcctttctctatttagccaatccagttagtttagattgtgcagtctgactccagccaatggggacaggacacagaagtagggactgcattagggataaaaaccccttccctctcttgtatggtgtgctctcacaacagccagagacatgagcagcctcttctgcagaagtaaatttgccttgctgagaaattcgttgtttgagtgctcattttctttgtgactccaagctcttgtttccaacagttggaaccttaggctccagtggcgtgggttcacaagttgaatcttctaatcagtgggattcactgttccatagagaaagcgcagtttcccagactgagtagcctgctcactcactgccccccttggctggggctgggggctccccagccccatttggctgtcaggtgggttgccacaccacactgcttttccttcctctccatgggtcacaccagccacctagtcagttctgatgagagaaactggatacctcagatgtcagtgcaggattcacatgctattatggttcttttctatgggatgctgctgctagtcagccatcttggccccacccccaccaatttttctttgaatgtctgatagagttcagcagtgaattcatctggttctgaacttttgtttttgcttggcaatttgtgaaattattatttcaatctcactgcctgttattagtctgttcagagtttgtttttttaatctaggaggattgcacatttccaggaatttattcatctcctttagattttctagtttttgcatgtaaatgtgttcatagtagccctgaatgtgatcttttgtatttctgtggcatcagttgcaatagcttccatttcatttctaatggagcttatttggatcttctctcttcttttcttggttaatgctgttaatggcctatgaattttatttatgttttctaagagttagcttttcatttcatttatcttttgtattttttttccgtttgtttcagttcatttagttctggtctttcttttcttctgctaggtttgggtttgacttgtttttgtttctccagttccttgaggtgttatcttagattgtctacttacgctctttcagactttttgatgtaggcatttgatactatgaactttccttttagcactgcttttgctgtatcccagatgttttgataggttgtgtcactattatctttcagttcaaagaatttttaatttctatcttgatttcatccaacgatcattcaaaaatgggttgatcttaagtttaatgttttttccaaaatttatttaattttcaagtatttgcatggttttgatggttcatttggagttgattttcaattttattacactgtagtctgagagagtagttgatatggttttgattgtcttaaatttattgagacttgttttgtggcctatcatatgtctatcttggagaatgttccatgtgctgatgaattaaatgtatattctgaagttgttgggtagaatgctctgtaaatatctggcaagtccatttcttctagggtatagcttaagtccattttttttttgttattgttgactttctgtcttgatgacttgtctagtgttgtcagtagagtattgcagtcccccattataattgtattgccatctatgtaatttcttaggtctagtagtaattgttttataaatttaggagctccagtgttaggcgcatacatatttagaattgtgatattttcctattggactagtttctttatcattacataatgtccctctttgtctttttctttttgactgtttttgctttaaagtctgttttgtctaatgtaagaatggctactactgctttcttttggggtatatttgcatggaatatctttttctaaccctttaccttaagtttaagtgagtcgttatgtgttgggtgagcctcttgaagacagtagatatttcgttggtaaactcttatccattttgctattctgcatcttttaactggaatatttaggccgtttacattcaacgttagtattgagatgtgaaggactattctattcattgtgctagtcattgcctgaataccttctttattgtgttattgttttataggccttgagagatttatgccgtaaggaggttctatttcattgtattttgaggttttgtttcaagatttagaactccttttagcagttcttacagtagtggcttggtagtggtgaattctctaagcatttgtttgtctgaaaaagactgtatctttccttcatttatgaagcttagtttcactggatacaaaatttttggctgatacttgttctgtttaaggaggctagacagaggaccccaatcgcttctagcttgtagggtttctgctgagaaatctgctgttaatctgatatgtctttctttataggttatctgatgcttttgtctcacagctcttaaaaatctcttcttcatattgacttcagataacctggtgactatgcgcctaggtgatgatctttttgtgatgaatttccttggtgttctttgaacttcttgtatttgcatgtctagatctctagcaaggccaggaaagtttttctcaattattccctcaaataagttttccaaacttttagatttctcctctaccttgggaacaccaattattgttagattttattgtttaacataattccaagcttcttggaggcttagctcatttttaaattcttttttgtttgtctttgttagattggaatattcaaaagtcttgtctttgaggtctgaagttctttcttctacttgtttggttctattgttgtaatttcccactataatttgcatttctttaagtgtgcctttcatttccagaagtcatggttgttttctatttatgctatctatttctctggagatttttttcatccatatcctgtattttttaaaaatttcattaagttagtattcacctttctgtagtgtctctttaagtggcttaataatggaatttatgaattctttctctggcaattcagggatttttttcttggtttggatccactgctagtgagcttgtgtggtcctttgaaggtgttaaaaaaaattcttgcttttggccaagcatggtggctcacagctgtaatcccagcactttgggaggctgaggcgggtggaacatgaggtcaggagatcgagaccatcctggctatcacggtgaaaccccatatctactaaaaaaacaaaaagctagccaggtgttgtggtgggtacctgtagttccagctgcttgggaggctgaggaaggagaacggcatgaacctgggaggcggagcttgcagtgagccgagatcatgccactgcactccagcctgggcgacagagtgaggctctgtaaccaaaaaaaaaaaaaaaaaaaaaaaattattgcttttttatattaccagaattttgttttggttccttctcatttgggtagtctatgtcagaagtaagacctgaggctctaggctgctgttcagattcttttgtttcatggggtgatcccttgatgtgatggtctccccttttcccttgggatggggcttcctgagagtcagactgcagggattgttattgctcttctgggtttaaccacccagtggagctactggtctctgggctggtactggggagtatctgcaaagagtcctgtgatgtgatctgtcttcaggtttctcagccatggataataccacctgctctggtagaggtagcaggggactaaagtggactctgtgagggtccttggttgtaattcagtttagtgcactggtttttttgaatgcaggttgttctagcagtgaagttgtcacatggacagactgaagacttctgtgtagccaggatgttacaatgttacaggtggaattagctgttgttttctcctttattggagtgggttttttttttttttttttttgagatggagtttcactcttgttgcccaggctggagtgcagtggcacgaccttggctcactgcaaccttggcctcctgggttcaagtgattctcctgcctcagcctcctgagtagctgggattacaggcatgttccaccatgcctggttaattttacatttttagtagcgagggggtttctccatttttgtcaggctggtctcaaactcctgacctcaggtgatccacccacctcagcctcccatagtgctgtgattatgggtgtgagccaccccacctggcaggggtcattattttgtgagttactgtaagggcttgagttggttggcctccaacctggaggtggcagctttaagacagcatcagctgtggtaatatgggggtatgcaagcttgccaccaggtcacctggataagtattcatgtttttcaggcaatgagtgggaacatagagctcccaagagagtatgtcttttgtcctcagctaccagggtgggtagagtaagaccatcaggtgagggcagggttggacatgtctgagctcagaccctccttgggtggggcttgctgcagctgctgtggggttgggagtatggttctcaggccaatggagttatgtttccagggggattatggctgcctctgctgtatcatataggtcaggatggaagtgaaggaaagccagcagtgacaggcctcactcagctcccatgaagccagcaaggccagtttcactcacaccctacccaccaacagcatcaagtttatatccagttggtgagcagtactgagatcttgccccaggctataagcctccccattgagaaagcaacctgggctttcaggccccacccctcaccacctgccatggattctgtgcccatatctgtgcttcccattcactgtcccctcaccgattctgccaaggaaaattcacactaggtcaaaactattacaaagtttagctggcagtttccttctccctgtggttcttccccaattccactggcagcccgtcccaaggacccctgtgagataaagtcagaaacggcttccctgaggaccaagagtgcctgtagggctcttcccactgcttcttctacttttatattttgcttggctctctaagttcatttcggctctaggtgaggttaaatgcttctctggtgatctggattttcaggttttgagtatgtgtgtttagaggtgaatgttccgtctcttacacttttggcactttctgtttttcagttgtctcgcagaggttgcagtggcaagccacttctttcaaagagtctgtgcattcttttggttttcctggtatgtttctatggtagttcttggagcaaaagttcatgatgagagtctccacatgctgttctgtccatccaagtgggagatacaagttagtcctgtctcctagccaccattttttctttttgccttttgagagaaagatattgattgactcttcatcagagatttaaaaaaaactgttaagtaggacttctctctctttctttttcttttcttttttttttcttttttcttttcttttttttttttttttttgccaaggagttttattcttgttgtccaggctggagtgcaatggcacgacctcggctaactgcaacctctgcctccctgattaaagcaattctcctgtctcagccttgtgagtagctaggattacaggcattttgtatttttagtagagacagtgtttcaccatgttagtcaggctggtatcgaaatcccaatctcaggtgatccacctgcccggacctcccaaagtgctggcattacaggcgtgagccactgcacctggctctctttattgttttaaacagaactctaatttttcttcaggccactgatttagtttcttattatacatttatttatttatctgtttcttattgcctgtccccccaactagaccaattgcaaaaaattcaactgcagaaatataaggtaagtttttcatggatgattactcattaactataaatacataaaaattttatgtacacatttatctgagctgccctcatatggccttctacagaatgcttgaagttagattaaaaataatctacagataaatattcactgatagaatgcttaaagttgaagcctactggtgaaaatgttgttcctttctcaccagaaatgaagtagatacatttatttctggacttgctattatgcttcattagtgtgtgtttatttttatccagtgccatgccgtttgcttattgtagctttttttttttttgagacaaggtctcattctgttgcccaggatggagtgcagtggcttgatcatggctcactgtggcctcgacctcacaggatcaaaggatcctcctacctcagtgtctcaagcagctgagactacgggtttgtgccattattccctgctaatttttgtagtttttgtagagatggtgttttgttatgttgcccaggctggtctaaaactcctgggctcaagcaacccaccttggcctcccaaactactgggatcacaggtgtgagccactacacctggccttactgtagctttgtaatatattcagagaccaggtagtgtgatgccgccagctttgttctttttcctcaagattgcttaggctattctgggtctttcatgaattgataaagatttgtgaattactttttaattctgtaaaaaatataattggaatttttataaggattgcattaaatctgtagatcactttgggtagtatggacattttcacaatattaattctttccattcatgagcacggtgtctcatgaattttttagtgtcttcaatttattttattaatgttttagagtttttagtgtatggatcttttacctctttgaataaatttatttatgtgtattttattctttttgatgctgtggtaaatgaaattttaatctcaatccttgtctacacatctattcaactttaacagctttagagtttaaaccaaatacgtgtggcaatgcaggagaggaaagaaacccaaagttttatagttttgtaaaatacaggtgctcaatttagcatcctgtgttatgccctggggtgccaagcatcgcattaagctcaaacttaagctcagattgacttattctttgggataacccaaagatagaggaactcatcatccttattttacataggcagagatggccaggcgctgtgactcaccctgtaatcccagcactttgggaagccgaggcaggtggatcatgaggtcaggagcccgagaccagcctgaccaacatggtgaaaccccgtctctactaaaaatacaaaaattagctgggtgtggtggcgggcgcgtgtaatcccagctactcaggaggctgaggcaggagaattgcttgaacccgggaggtggaggttgtggtgagccgagattgcaccactgcactccagcctgggtgacagagcaagactccatctcaaaaaaaaaaaaaaaaaaaaagtacataggcggagatggctgcatagagagaataaataaatatacacaatcgcatggctggtacatggtaaactggaacttctagtacaggccatctgaccctgaacttcaaatgggctgggaagcttcttaccttctgtctatgaaaagaccagagatgccagagaatgccatttgagtctttggtgaataggtgaaaacttcaaatattgataatcaggaggaaggagttagattgacccactacttgatggaacacttatttttaacttaatgcagccatgaaagtgcttataacacttggggctttaagttcatcaattaaggcagaatttctatatagtatgcttttccctataaaatgtatttagccattgataactctatgtagttctgtggaatatgtgcttattagacagatcaggtgtttcggctaagaataagatgagtaactgtgttttaaaaatatatatttataaataattttaatcttgaatatttaataaccattaactactgtttgaatacgtctttgtccaaaacatatatatgtctatatacattctagataatatataatatgtatatatataatacatacatacatatataatcatatgtaatataactgtaccttctgtggctattatgagcttcattgctcgcaagctccaggatatggggcatcaggtactcaagagtggcagcaggaaacataagcatggaagagtccaggcactgggcacaggagatctcccacaagaggtgtccaaatataccaaggggaaccgtacgtagttctgctcttgctaagagtgtaaagtctgtttttttgttgttgttgttgagatggagtttcactctgtcacccaggctggagtgcagtggcatgatctcagctcactgcaacttctgcctcccgggttcaagcaattctcctcgctcagcctcctgagtaggtgggatgataggcatgcgccaccacgcccagctaatttttgtatttttagtagagacggggtttcactatgttggtcaggctggtcttgaactcctgacctcttaatccacccacctcatctgcacaaagtcctgggattacaggcatgagccactgtgcccggcctgaagtctgctttttatgtctatcagagcttcaaagtcttcttttcctagacatgggcttttgtgaatggtatagtttagatgtagtttgtccctgaaaaagactcatgttgaaatttgatcccctatgtggcagtgttgggaggggggcctcatgtgagattttaggtcataaatagattaatgctctcctgcagagatgagttctcactctcaaagtttccagcaagaatagatttttaaaaatctggctttctcaagtttatctcccttttgcttcacctcttgctatataatctttttgcacatacctgcttcccttctgctttctaccatgagtggaagtaacatgaggtgttggggtgatcagacccaacaccaggtcgtgggggtgacgaagtccgttggagtcaaaggactgagaaaaagacagtttgagagagaaagtgggaccagggggccatcacgagtgtggagactgtgaaggccccaagctctgggagcccatgctatttattggtgccaaacaaacaggtgatgaggatttgggggttgaaaggaaacagtgtatcaagtgaatgagaaacatatggctgcttgagataacgagagtgctagaagcaaggagccagcaagtctagcagacatgcaagccctgcctcagcttctctcccaacactcagcttttctcccaacatgaggctttcaccaaaagccaaacagatgccagctccattcctcttgtgcttcccagcctgaagaaccatgagctaaataaacctctttatacattacccagtctcaggttctcctatatcacaaaaaggactaaaccagtgagctttgcattaatcaacctgattttcaacctggccttggcctctcaagaccccagtgctcagtcacacccactatgtccatgtgggcctgtccttcactcatctttgtaatactctagacttttgaatgccactcatgtcaacttggccatgaactggcctaggcctagaaatgcccatgattagaatctagtcactctaatgactgaaccctctttttaaagaaactctagctattcaattgactttgttgtagaaaaaaatgtgtcatcaataaaatactttgccctgtctagaggacaccactacagattatcacactctagccagtactctctttgagtgcttttacaactttttctaaggtttaggtcactgaaagacattcacaatgtcttgtccagtagagtgtaaattgtttcttctctcacaatacaataatacgagtctccctccatttatatatttatttaaatatttccaatttatattgcttttgctgtatatttgaattttttttgtactggttatcatgtatgctgattcctcagaagttaaataaacattttaatatgtgtgcctatcttttgttgttatttagatatctaggtgactacagcttcagtagaaatttgttgacttcgttttgattttatttgcaattttcctttcggcttatttagtgtttctgtgtttttctgctgcatttacagcatattatctagtctttatcactggcaacagtggcttgaagtttgtttataaaattatgtttattgagatgaaattcacataacatcaaattcaatatcttaattattttcaggtttacagttcagtgtctttttgtgtattcacaatgctttacaatcattagcactaggtaatttttgaacagtgtaattacccaaaaaagaaaccccacacccatcaaaagccactttctattttccccaccggcctctggcaaccactaacccgctttctgtttccaaggatttgcctattttgggcatttgatacaaatggattcataaagtatatgatgctttttgtatagcttttttcttttcttttcttttgagatggattctcacactatcttctgggctggagtgcaatggcacgatctcggctaactgcaacctctgcttcctgggttcaagtgattctgctgcctcaacctcctgagtatctggaattacaggcacacaccacaacacctggctaattttttgtatttttagtaaagacggggtttcactatgttggccagactggtctcaaactcctgacctcatgatccacctgccttagcctcccaaagtgctgggattacaggcgtgagccaccgcacctggccttgtatagtttttttcatcaagcataatgtctttaatatccatccatgttgtgtcccatattagtacatcattcctttttctggctgaatactattgccttgtatactacatcacatttgtcaatctagtcctccatggataggcatttacactggtttcactttttggctataacaaatgtttctatggacatgcatatacaagtttttgtgtggacctattttgatttcagttgagtatatactcagaagtggaattgctaagccatgtggtaactctgtgttaacctcaggaggaactgccaaaatgttttccaaaactgctgcctaattttgccattccaccagcactgtatgaaggtttcaatttccccacatcttcacccacactgatctgtcctctgaaatatacctgtaccagcaggtgtgaggtgatatatcactgtggttttgacttgcatctttctaatgaacaaagatgttgtgcatcttttcatgtgctcattggccacttgtacagaataaaaatcttggagccactggtccagattatgagtctcaaacacatgttacgaacagatttttgatgctgcacaagaaatagcactcagcaaggcaaatttacttctatagaagggttcacctcgtaaattaagcaatggcaagggcgcacagaacaaaggaagcaggagtttttattatctctgacacagcttctacttctgtatctttcccctattggttagggttggaccgcacagtctaaaccagtcccgattggctaaatacttaaaactttttagataaggtagtcacgtaagggaagtaagagagaaagaaggcgggtcacttatggggaaactacaaaagtaacctattccctaataaggaaaggaatgtggactgggactggggttgtaggaagttcacgcatgtctaggcatagttagataagttggggcacaggtgaggtaaggaatatttggaattatagaataaagaatggggaaaatggataaggtatttgaagagtgaacctaactgtatctaacacacaaaacaccatggaatgatgataattcagtacatagtaatcttataattctgttattatctaatgaagaacagcatcccaaatcttttttgtgttgtttttgttgttcgatttgccaatcacatgcatagaaaaaaatggtatttaccagtgtatttacaatccaggacaagatgttggagggcccaatgtatttgggagcttgtagtttcaactgtgcccacctgatgtggctgataataatagttagaagatactcaagagggccgggcatggtggctcatgcccagaatcccagaactttgggaggccaaggcaggtggatcacctgaggtcaagagtttgagaccagcctggccaacatgttgaaaccccgtctgtactaaaaatacaaaaattagctgggcgtggtgtcaagcacctataatcccagctacttgagaggctgaggcaggagaatcacttgaacccaggaggtggaggtggcagtgagccaagatcatgacattgcactccagcctggtgacaagagcaaaactctgtctcaaaaaagaaaaaaaagaagatacctaagaggcaggtggtggcaatacacacacctctgcccactctgtgaacatagaaaacacatttgaatgcaatgtcactgaggaaatgctttaaattaaaaacagtcattgtctgtaaggctgctttggataatatgaccgagatgttggctatagccaggtgcttgagaatcaaatctgtggactttagtatccacctggtgtaacgaaatgcaaaaaaaaaaaaaaccaaacaaacaaataaacaaaattccccaataatcagactgttgtctgagaaaagatcattcctattaccaaatccctggaggccattcattattttccagttactaatattttcattcagagtgagaatattctgcatagacacataaggtctgttttatggtggcaactaaaatggactatttttccacatactattgttttcaacttataactttgtttttaaactccacttttctttcactaagatttttttgattctctctctctttctacacacacacacacacacacacacacacacagatataaacacatacacacacatatagatatttacacattattttcatttagcctgtgcttttaaaaataaatttcagtggttgacacctagttcacatgttgtcaggcattttctattttagtaatttaattttcacctatattatttcattgaaatacatttgaattaaatatgaaactttaatatgaaagattccattggcttttcttgcaaaaaactttaatataaaagatgccattggcttttttattattataaatatatgtagtgtgataacactgtatacatagcactataaaactactgtattagtgtgttacatataatttttataactctatgaagtgctttattattcccattttacaggtgaagagagcttagatacaaatagaataaataacatttctaaaatcacctccttgtaggaggcagtttcaggagttgaagatgtttttaacaatagttaatatatgctgtctcaacatcagatatatattttttaaaaatctacataggccaggcacagtggctcactcctgtaatcccagcaatttgggaggctgaggtgggttgatcacgaggtcaggagatcgagagtggtgaaaccccgtctctgttaaaaatacaaaaactagctgagcatggtggcacgtgcctgtaatcccagctactcaggaggctgaggcaggagaattgcttgaacccaggaggtggaagctgcagtgagccaagccactgcactccagcctgggtgacagagcgagactttgtctaaaaaaataaataaataaataacgacacatattttaaaaacatgtacctcttgttagctttttaaagaatgtttgtacatatttatttaaaaatgcatatgaaaattttacatttaaatatgattgcataatttattggcaaatatctataatgattcaaagattcaagtagaatataaatgttctgatttagcatcatcttaaaataagtggaatttgttgaatgcaaaaatggtttcctcatggaattagaagactttttaacttaaccaagaaggagcacataatggaatggcaattgagaaaagggacttgaaacatgagtagaaggtcaaatattgcatagaaaaactaaattaccataagtatatagagaaaatcagtatttgtgaatgcaaaaatatcaaataaaattatgtcagggaggtgaaagatctctgcaatgagaatcacaaaacactgctgatagggatcagagaaagcacaaagtaatggaaaaccattccatgctcatgaataaaaagaatcaatattgttaaaatggctatactgtccaaaacaatttacagattcaatgctattcctatcaaactaccaatagtattttccccagaattttttctaatatttatataaaaacaacaaagagtctaaatagccaaagtaatcttaagcaaaaagaacgaagctagaggcaccacacttcccaacttcaaactatactacaaagctgcagtaatctaaataacatggtactggtaaaaaatcagacatatagaccagtggaccaggttagagaacccagatataaagccacccacctataactatctgatctttgacaaagttgacaataacaaccaaggggaaagaacttcttattcaataaatggtgctgagataatggactagccatatgcagaagtttgaaactggacctctatctctctccatgtacaaaatccacctaacatttgctacagacttaaatataaaatctaaaactgtaaaatccctaggagaaaacctaggaaatactattctgccaataggtcttggcaaagatttcacgatgatgacacccaaagcaactgcaacaaatagagaaactgacaagtaggacctaattaaacttaagagcttctacacagtgaaagaaactatcaatagagtaaacagacaacctacataatgaaagaaaatatttgcaaactatgcatctgaaaaaggtctaatatccagaatctataaagaaacataaatggccaggtgcagtggctcacacctgtaatccccgcactttgggaggcctaagtgggtgaatcacgtggtcaggagtttcagaccagcctgaccaatatggtgaaacccccgtctttactaaaaatacaaaaaattagctgggcctggtggtgggcacctgtaattccagctactcgggaggctgaggcaggaaaatcacttgaacccaggaggtggaggttgcagtgagccaagattgaacaactgcactccagcccactccagcccgggcgacagtgagagacttcatctcaaaacaaacaaacaaacaaaccataaacaaatcaacaagcgaaatataaacaaccccattaaagaatgaacaaaggacataaacagacacttctcaaaagaagacatatgcacagccaaagagcatatttaaaaaatggtcaacgtcactaattattagagaaaggcaaataaaaaccacaatgtgacaccatctcagtccagtcagagtgtctattattaaaaagccaaaaaacaataaatattgatgaggttgcagggaaaagggagtgtaagttagttcagccactgtggaaagagcaatgtgaagatttctcaaataactttaaatcatctgacccagccatcctgttaccacatatatacccaaagggatataaatcattctactataaagacacgtgcacacatatgttcattgtagcacttttgacagtagcaatgatatgtaatcaatctaggtgcccattaacagtggactgaattagaaaaatgtggcatatgtacaccatggaatacaagtcagccataaaacagaataaaattacgtcctttgcagcaacatggatacagctggaggccattaatataagcaaattaatgcaggaacagaaaacaaaatactggatattctcacttataaatggaagctacacaacgagtacacacgaactcaaagagaaaaacaataaacagcagggtctgcttgagaatagagggtgaggggggtgaggatcaaaaatctacctttctgccaggtatggtggctcacgcctgtaatcccagcactttgggaggctgaggcgggtggatcacctgaggtcaggagctcaagaccagcctggccaccatggtgaaacctcgtctctactaaaaatacaaaaattagctgggtgtggtggcatgcacctgtaatcccagctactcatgaggctgtggctgaagaatcgcttgaacccagaaggcagatgttgcagtgagcagagattgtgccactgccctccagcatgggcaacaagagcgaaactcttgtctcaaaagaaaaaaattaaaaaaaaactacctatcaagtaccatgctcactacttgcctgatgaaataatgtgtacaccaaaccccagtgacatgcaatttacccatttcacaaacctgcacatgcgcccttgatcctaaaatagaagttggaagaaaaacccacaaataaaaaagattcagaactagagtagataaaacaacaatgattttaaaaagagcttttttgcccttctaaaatatgggtgttaatagatgttctggatcttcagcctcatcttggaccatgaagaatggaaaacaaatgtcaggggtgatggagcagagacatccctaaaggcttcctgaggctgccatgctggcccaggtatgcctaactcctgagtttttatgtgaaaaaaatataacttacgtgttttaagtcagtatagatagatctctattattcatagctgaataaagtaaaatgagctgttgaacttgaaaaaaaaatagagatattttgaaaaatttgctccagttacaatttaccaataacaattacagctctttgccgggcatggtggctccctcctgaagcaggtggatcacctgagagtttaagcccagcctgaccaacgtggcaaaacactgtctctactaaaaacacaaaaattatctgggtgtggtggtgcacgcctgtaaacccagctacttgggaggtggagtcaggagaatttcttgaacctgggaggtggagattgcagtgagccaagatcctgctactgcactccagcctgggcgtcagagtgggactccatctcaaaacaaaaacaaaaacaaacaaacaagaaaaacaatgacagccctctagtgtctccagagaaatgaaggagtttggaacagtctcctctcttctatgatttctgaagaaagaaagaggctcacatggagggctcagaaaatgctgagtctgatacatgaaggacagacagtgaagtcagtgtgtctttctggattctgtgcttccttaaaatgttctgctaaaaaggaaattttctgttaatcttcaaattcctgagccaaactagtctttaatatttaatagagaaatgtgctgggcatagtggctcacgcctgtaatcccagcactatggaggctgaggcgggcagatcacctaaggtcaggagtttgagaccaggctgaccaaaatggagaaaccgcgtctctactaaaaacacaaaattagtcgggcgtggtggcacatgcctgtaatcccagctactcgggaggctgaggcaggagaattgcttgaacccgggaggccaaggttgcagtgagccgaggtcacatcattgcactccagcctgggcaacaagagtgaaactccatctcaaaaaaaaaaaaaaaaaaaagaacaaccccactacaataaaggagaaaacaacagcgaatttcatcacctgtaacattgtaacattctagctacccagaagtcctcagtctgtccatgtgacaacttcactgctagaacaacctgcattcacaaaaaccagtgcactaaattgaattacaacaaaggaccctcacagagtccactttactcccctgctacctctaccagagcaggtggtattatccatggctgagaaacctgaagacagatcacatcacaggactctttgcagacaatccccagtaacagcccagagcccagtagctccactggatggttaaacccagaagagcaataacaagcactgcagtctgactctcaagaagccccatcccaagagaaaaggggagaccatcacatcaagggatcaccccatgaaacaaaagaatctgaacagcagcctagagcctcaggtcttacgtctgacatagactacccaaatgagaaggaaccaaaacaaaattctggtgatataaaaaagcaagaatttttttaacaccttcaaaagaccacactagctcactagcagtggatccaaaccaagaagaaatccctgaattgccagagaaagaattcataaattccattattaagctacttaaagagacgccacagaaaggtgaatattaacttaatgaaaaaattttaaaatacgggatatggatgaaaaaagtctccagagaaatagacagcataaataaaaaacaatcacaacttccggaaatgaaaggcacacttaaagaaatgcaaaatatagtggaaaattacaatagaaccaaacaagtgaaagaaagaacttcagaccccaaagagaaggcttttgaatattccaatctaacaaagacaaacaaaacagaatttaaaaatgagctaagtctccaagaagcttagaattatgttaaacaataaaatctaacaataattggtgttcccaaagaagaagagaaatctaaaagtttggaaaatttatttgagggaataattgagaaaaactttcctggccttgctagagatctagacacccaaatacaagaagtccaaagaacaccaaggaaattcatcacaagaagataatcacctaggcacacagtcatcaagttatctgaagtcaatatgaaggaaagatttttaagagttgtgagacaaaagcatctggtaaactataaagaaaaacatatcagattaacagcagatttttcagcagaaaccctaaaaactagaaagaattggggtcctaagtttagcctccttaaacagaacaagtatcagccaaaaattttgtatccagtgaaactaaacttcataaatgaaggaaagatagtctttttcagacaaacaaatgcttagagaattcaccactaccaagccactactataagaactgctataaggagttctaaatcttgaaacaaaacctcaaaatacaatgaaatagaacctccttaaggcataaatctcacaaggcctataaaacaataatacaataaagaaggtattcaggcaacgactagcacaatgaatagaatagtccttcacacctcaatactaacggtgaatgtaaatggcctaaatgatccagttaaaacatacagaatagcaaaatggataagaagacaaatatctgttgtcttcaagagactcacccaacacttaatgactcacttaaggtaaagggttggaaaaagatattccatgcaaatgtaccccaaaagaaagcagtagtagccattcttacatcagacaaaaaagactttaaagcaaaaacagtttttaaaaaaagataaagagggacaaaaaaaaaaactagtccaacaggaaaatatcacaattctaaatatatatgcacctaacactggagctcctaaatttataaaacaattatcactcgacctaagaaattagatagatggtaatacaacaacacaactataatgggtgacttcaatactctactgacaacactagacaagtcatcaagacagaaagtcaacaataacaaaaaaaaatggacttaagctataccctagaacaaatgggcttgacaaatatttacagaatattctacccaacaactgcagaatatacattttattcttcagcacatggaacattcttcaagatagacatatgataggccacaaaacaagtctcaataaatttaagacagcagccataaaaaatgatgagttcatgtcctttgtagggacatggatgaaattggaaatcatcattctcagtaaactatcgcaagaacaaaaaaccaaacaccgcatattctcactcacaggtaggaattgaacaatgagaacacatggacacaggaaagggaacatcacactctggggactgttgtgggatggggggtggggggagggatagctttaggagatatacctaatgctaaatgacgagttaatgggtgcagcatacgagcatggcacatgtatacatatgtaactaacctgcacattgtgcacatgtaccctaaaacttaaagtataataataacaaaataaaaaaaagaaaaaataaataaataaataaataaataaatttaagacaatcaaaatcatatcaactactctctaagactacagtggaataaaattgaaattcaactccaaatgaaccatcaaaaccatgcaaatacatgaaaattaaataaattttggaaattaaataaatacatggatattaaataaaacattaaacttaagttcaacccatttttgaatgattgctggatgaaatcaagacagaaatttaaaaattctttgaactaaagataataatgacacaacctatcaaaacatctgggatacagcaaaagcagtgctaaaaggaaagttcatagcatcaagtgcctacatcaaaaagtctgaaagagcataagtagacaagctaaaataacacctcaaggacctagagaaacaagaacaagccaaacccaaacctagcagaagaaaagaaagaccagaactaaataaaactaaaacaaacaaaaaaaattcaaaagatgaatgaaatgaaaagctagctcttagaaaagataaacaaaattgttaagccattaacagaattaaccaagaaaagaagagagaagatataaataagctccattagaaatgaaagagaaaatattgcaactgatgccacagaaatacaaaagatcacattcaggtctactgtgaacatctttacatgcagaaagtagaaaatctaaaggagatgaataaattcctggtaatgtacagtcctcctagataaaaaaacaacaactctgaacagactaataacaagccagattgaataataatttaacaaattgccaaccaaaaataaaagttcagaaccagatggattcacagctgaattctatcagacattcaaagaaaaattggtgggggtggggcccagatggctgactagaagcagcatcccatagaaaagaaccataatagcatgtaaatcttgcaccagcacctgaggtatccaggttctctcatcagaactgactaggtggctggcatgacccatggagaagaaggaaaagcaatgtggtgtggcaacccacctgacagccaaatggggctggagagcccccaaccccagccaagggaggcggtgagtgagcaggctacccagtctgggaaactgtgctttctccatggaactgtgaaacccatggaccagaagattcaatttgtgaacccacgccactggagcctaaggttccaactgttggaaacaagagcttggagtcacaaagaaaacaagcactcaaacaaggaatttctcagcaaggcaaatttacttctgtagagaggtgctgctcatgtctctggctgttgtgagagcacaccatacaagagagggaaggggtttgtatccctaatgcagtctctacttctgcatcctctcctcattggctggagtcagaccacacactctaactcgattggctattctaaatcaagactggcaggaaggttgtttacagagtaggtaactaggagtgaggaggaattcttccaaataaagaagagatgtgggttacagattgggactggttggaagagttgtttacagagcaggtagctaggagcaggaaggtacaaggaagttgatttccagaacaaagaacaaggaagctatcctttgaagaggaacttattatgcctgacacaaccctggagctgagtagattctcaacagcctctcagctagaatctgcttaagcctgccaagttcccaggggaggggtgaccaacaccacagctgtggctggctgctgtctaagctgtttgagctccttgggggagggacagcagccagcacggggactcacaactgcctaacaggctaagatccttgggtggggaaaggcagcagccatatctatagctcctgaccacacttttcccctgctagagccagggaggctggacagcttggtctcaagaggtgttccccacagcccaacacaccggctgtggctgactgcagccagaatgtctcttcaggcctgaccctcacccatccctcctcactgggcagggcctccctccaagaactccaacagctccagccaggggctcagggacagaactgtgatctccctgggcctgaacccctagcgggagaggtggttgcagtttctgtggaccagcagacttagcctttctttctgctagttctgtggaattcaggcagcccagatgactgggtttccacccatcaaaacacccccctccaccaaggaacagtcaaagtgcttcattaaatgggttctgctccccgtgccacccaactgggtgagacccttcaataggggttgtcggacaccctatacaggagcaatcatactggattcaggttggtgcctcttgacatcagtgatctcagaggaaggagcaggcaccattctttgctgttctccaacctccttgagtgacatctccaggtacaggagtaaaccagatgaatagagcctgaagtgaccccccagcaaactgcagcagccctacagaagagggacctgactattgaaagaaaaacaaacaaacaaacaggaagaaacaacaacagcatcaacaacaaaagcgtacccacaaaaaccccatccaaggctgggcatagtggctcacatctgtaatcccaatactttgggaggctgaggcaggcagattgcttgaggtcaggagctcgagaccaccctgccaatgtagcgaaacccagtctctcctaaaaaatacaaaacttaaacaggtgtggtggtgcatgcctgtagtcccagctattcgagagcctgagacatgagaatcatttgaacctgggaggcagaggttgcattgacccaagactgtgccactgcactccatactgggtgacagagtgagactctgtctcaaaacaaacaaacaaaaaaactcatccaagggtcagctgcctcaaaatgttgaaattagacaaactcatgaagatgagaaagaatcaccaaaaccctctgaaaggccttatctcctagagatgatcacaatgtctcttcagcaaattcacagaactggacagaggatgagatggatgaagtgacagaagtaggcttcagaagatgtgtgataacacactccgctgagctaaaggaacatgttctaacccaatgcaaagaagctaaggaacttgataaaaggtgagaggaaatgctaagtagaataaccagtttagagaggaacataaatgacctgatggagctgaaaaacacagcatgagaacttcatgaagcatacaaaagtatcaatagcctaattgacaggcagaagaaaggctatcagagtttgaagaccaccttgccaaaatgaggcaagcagacaagattaaagaaaaaagaataaaaaggaacaaataaggcctctgagaaatatggtgttctgggcaggaaatgcatgaggggagaagaaaacacacacacaataccattaagggtaaacaagctttatcccacctaaaaggcaatgcagatataataagcaaattgatatcataagcaaattgcaatgggaaagggagaagggaaaatatgtaaataaatgtacaaaaccaaactatgtggtccatagttcaccctatttaaaaatatgtagtcctcataatattccatttaacagcctgttgtaactctttggtgttaagcccaagcacatctaatatatgctggtgccaccaccagaaacgtgtcccatcacaccaccataagtggtgtctctctctgatgttggaagagacagtgccaaggacattttcgctggaggtaggaggtggggtcataaaaggaatagcaaagtaccttgttcaaaaggatcagatatagttacactcatcagactatgggggattcgtcaccacaccaggaagcaacagcctgggctccagagtcggccacccatctgtgcacaaacaaggagaggtctcttgaagccttggtgcagtcttggaccctgtctctttttgtaacaagttgtttggcatgaggcccagtgatgagggccctttgcgactgggctcagggaacacaaaaaggtcaagttgtttttgtgattgtctattgtttttcaataactaacgtataggaatagattgaaatagagattctttctgaaatagcgctggatgaacgcctcaaggggttcacacaacctgtgccaggacttggtgaccattgtttgtgtccatgttcaatttagttcaaatttaatatttaacatgtcctctacattcggcctcaattggatactcaattgtaggaaaatacccttacagatacaaggggaaggcataattgatatagattacagatacagggtaaggacaagagaattaaaagcacaattaataaaaaccacacccaccatggctttgcaaggagagtcatattgtgagaactgccagagatatacacacaacattcagtatgcagtaaggtgcaaacccctccttgggttgcggtaagcatatctaatgccatttgattttgcaacacaacagtactcagatgagcaaattcatctgataacaacataaattcagtgctactatcattaagagctttttctacatgtaaggtaaatcttttaatttgttgctgaagcaagattgtacgggcggcaggggagaatactgtgatagggtaccaccaccagggagtccagtgcattggtaaccagcgatgtttgtaagcatctagattactggggaggggaatattaacctggatggtgaatgtaattaatggccacccccaagtgcatctccccatccaatgcagggacaggtatcaccacccataggatctgcatacccagagggccccccaggggacagcaatggatctactgtaatcatagtgtactaatctcttattaaaataggaaagagattgtggttcattgggggcaatgttgttgatttggagtatgtgttgacaaatgtctgaagaaaccccaaataaacattagaggagccatttaaggtctccagacagagtgggaactgtatggaatccggccaccagcacagcaggttttcagtatattccattccaggattattgggcaggataccaaggcttttgatgcaaggggagggtggagttcatcttttgtctgacttggcaaagatagattgcttagtgtggtgaaaggaagcccaggttggattgcaagtgttgttgttgttgtggccctactggtaacaatatagccattcagaaatgttgtcagggacaattctgcaaggtagcacattccaggcggcctccggcaactcaacatatagccaacattgactgcggttggcttcagttgcagcagtggctaccaagttgatgaatttattcttggcttcagacacaaagacacaggtgctgacgagtagtagatagattatttcttgtaataacaaaaacagaggggaacaagatattgtttttcatctttaggaaattgtactatgccttcatttcctgctttcatagctacaaagtcaccagccttagggtcaggatctgatggacgctgtacccatatttcagctccaggatttaagctacctgtaccaggggatccgaatcccccagttctgtatgtagcctctgttggggcagagatttcctcaggggttgttgacaaggtaccactaacaattgagcaacccacatttgtggttttagagcaaaagaatctggagtgtataaaatgacctttaactctccctggtaatcgctatcaattatagcaccatacattataatgcctctcattgcaaggcttgaacacgttgtaatccattcatccgcattcatgtttaccgttatggtggaaattttggcctgctgttcttcctgctgattaagtagtctgtcaagagaaagcagagactcatgagcatcaatatggaaaacagggccgggtgcggtggctcacgcctgtaatcccagcattttgggaggcccaggtaggtggatcacgaggtcaggagatcgagaccatcctggccaacatggtgaaaccccgtctctactaaaagtacaaaaattagctgggcatggtggtgcgtgcctgtaattccagctacttgggtgactgaggcaggagaattgcttgaaccccggaggcagaggttgcagtgagcgagattgtgccactgcactccagaatggtgacagagctagactccatctcaaaaaaaaaaacaaaaaacaaaacaaaacaaaacaaaaaaccagtgataatggtagtgtgtgctaggattgagatatctccccagtattgttttccccaaacctctttattcccaattaaccatttgctttgttgcctggggcatccaggtagtaagaccatttggtattgaccaagagttggtatagaagtgaaaaatccctctggtctccttctgaatagctcaggggaaccgctactagttcagctaactggctgctcccaccccttccttcatcagaaatgcttttgtttttaataggattataagccacagccttccagcattgattcccaccaatgtatttggtggatgcatcagtaaaccaagcatgtttctgatcctctgggcttagttctttaaaggatttgccccattgggtgggggaggtttccttccctatctgcaggacttgctcggtggtttcctgagctgggagattttgtacatccttatgtaaaagtgatactcactttggttttgacttagcctggtcttgtatgtaccatgtccattttatgatgctactttcttggacatgtcctatctgatgggttttgggggaactcaagtcccaagtcataataggaatttcgggcctcataaagacatcatggttgaagcagaggtgttccatttccagcaaagcccaatagcaagctaacaattgcttctcgaaaggggtataagcttttctggcctctggcagtttctgggtccaaaacctgaaaggtaccctcttcccatcttgtttctaaggctccaattagcctgttgatctaggacagttacttgcagttctcctggcccatcctgtatggaccatagatccagggccagttgcaccgcttgtttatcttgttcagaagccatgctgtctgtctctccccaatgaaagtcatagtgttttctagtggctgcatgcagaggttgtaaaatattactcaagtgaggaatatgatgtctccagaatccagagatgtcaataaatgtctgggcctcctttttagtggtaggggttgcaaattctagtattttagcccctttaccttttgtaagatggactatatctctgcattccataggatgccaaggtattttacagtttgtgcaggtccttgaattttgctaagcttaatttcccatccttgagataggagctgggtttttacctgctccaagccccagcaaagtagttcttcagttttaacctgaccgagtcattctgacagctgctttttttcagcaatagggtgatagctttgagcctgatcagtcaagatataggcctggcattgggccagggccagtctggaaatcacactggcattttccttttccaacttacatttctcttatagcaaccagcccgtatcttgacacattaacttataagcagtaagcaaacaccatccactctgggagatccctcagcatctcctttgctgactggaatctcctgcagcacttcccgcacagtcaaaggtttaaattgcactaatttagattctcagttctcacaaaggccagttccccttgaccattcagttgccaagggggaaaactgggggagttcccatcctgagacatgggaagtccctgagcctccagccccatccttctggccaaaaagcggcatacttttgtttccaaatactgtttgtgacaccaaaaatgttctgtgcaggaaacccgcgaggggagaagaaaagacccacacacaatacttttaagggtaagaagttttataccacgtaaatggcaatgcagatataataaacaaataatataataagcaaatcaatataataagcagattgcagacataataagcaaattgcaatgggaagaggagaatggaaaaggtttacactcaccagactgtatatatttacaccaccagactgggaagaaacaacctgggctccagagtcggccactcatccgcgcacagatgaggagaggtctcatgaagctttggcgctatctgggaccctagctcttttgtaatgagttttttggcatgaggcttagtcatgagggccttttacgaatgggctcaaggaacgcaaaaaggtcaacttgtttttgtgcttgactattgtttttcaataatgaatgtataggaatagattgaattagagatttctctgaaacagcgcgggatgaatgcctcaaggggctcacacaacctgttccaggacttggtgaccattgtttgtgtccagattcaattaagttcaaatttaatatttaactttacctccataccagactatggaggattcaccaccagagtgggcagtaacaggctgggctccagagttggccacccatctgtgaacacatgaagaggaaaaaaaaaaaaaagtgaaaaacattatcccacagtttgcaaaatatattacatttaaacagttgtaaatacatgaacataacatctcagtcataatcaaaattaagtatctgacaacacactcgaaagtttgggagaaatagaaaagtgtttgtgtcttccccaggcccacagttccagtgccctgtgctccctcattgtcatggggttgccatgggccccacaggatatgggaggcacagagcagatggtggctgaaggtggggtgtcttgtgggaccagcttcaagatcagagaccttggttcattgtattgaaatcagccagctcaggaaaagagaccttgctgcctcaagctctatgtccatctgcattagcgatgtaaggaggcttgagcacccatgggcacacaaacccatcccactccaatatttcatcaactattgaggagtctgaatccatgttcttgaggagcatatgcttctgcagttacaaccactatggaaaacagtatggagattccttaaagaactaaaggttatctaccatttgttccagcaatctcagtaatggctatctccccagaggaaaggaagtcattatatgaaaaagacacttgcacatgcatgtttatagcagcactatttgcaattgcaaaaatatggaactagataaaatgcccatcaatattgagtggataaagaaaatgtggtacaggtataccatggaatactactcagccataaaatggaacaaaataatggcattctcagcagcctgggtggagttggagaccattattttaagtaaagtaactcagaaatgataaaccaaacatcatgtattctcatttataagtgggagctaagctatgaggatgcaaaggcataagaatgatacatgaattttcggggaggaaaaatgggagtgggtaagggataaaaggctacacactgggtagtgtttactgctcagatgatgggtgcgtcaaaatctcagaaaccaccactaaagaacttagccatgtaaccaaacaccacccgttcccctaaaacctattgaaattaaaaaaaagaaaaaccatcccaatttctcattttaaaattgggaaactgaggccccaaaagaggctggaaattagagcccctaaataatagaaagccctgtgctctccttctccacatgggctatttttgtctccatattctcagataagcacacacagacacacacacagaaacacttctcagggaaagatcatggaagcgaggatagagaagaggcagacagaaaccaggcataagacaaggaaaaaaaaaaaaacccagaatagtggcagctctgctataagccagtgcatgcactcctctagctacgtgtccaggggcacagagaatgagcaggaggatcctccaggtttccagggttctccatcagctggggtcatctccaggtcagtttcaagaggacaggactggggtcctactgtccaactctgtaggtacctgaaatggaaatgagctatgtccccatctcagcctagcatagacaatggctacagcaaagccttttcatacctcataaataagagtacttgaagtgggtgacctcaatggtttcacatacccataagtgtctgctggcctttgttcttcattggtgaaccaagactctttgctctgagactgcaaaaatgcttctactccctggaagtccttcagagtgaggcatggtcaccccagaggcatcttgggtagataaagctgagatagagcgaaatgtgccatataactggactctgagtctgaagcccagggaaaatactagttcctgttgtgttcttgagatgatcatttggaagtggtagaaaacagtttccctggatgaggggttgtccctcatgagtaaagagcacaccccaaaaggtggaggcaaagagaggacaacggaggcttccaaggttactcttatcgcacttggagcctccggatgctgctcctttgtcccctgggaccctggagagccagtgtcttgaggacccaaacataaaaatagctttgttctgtgaggctcctgcatggggctgcagtgccagtgatggcctctaggtggtgagagccttctgggtttttggtgcccactgagctttgctggagcagctggagcaaagaagtcacaccgaggtcatgcaccttgagttattattaacgatccccatattatcaagtggtcaaaagcaggaaggagaatttgagattcccccatgcattcacttagccagtctttcccttacactcaccctgtgccagctaccctggtggacccaacatgtggtacagaaaatgattgaatcatacctgcaccgtaccctgaggaccagtctgaggacaggtgaccaaaaacactaaagcaagtatacgtgaaagaaaagagcaactgctataatataaagtagaatgttgacagaagagctgggaaatcatgacatggagtgacccaaatgcctcactgagatgacatttataccatgatgacaatgacaatagggagccagcgctgcaaaagaatgtgtcagaagaagccacccttagtaaagaatctcacaggtgtgagttgggcagaagttagaaagggaccactatggccgcagagagcctgagacagagaagcagaaggatggagaatcttggggcctgggagatgaagctagttatctgcttctttcttacaacattgccctgaaacttagcacctttcaacaacaaatactatctcacaatttgtggggaccagaaactggacacagtttagtggggtgcctcttcctcaaggtctttaggaggcttaggcctcataagaagctggacttctcaacagaagctggactggggaaggatcagctttaaactcactcatgtggaaattggcaagactttgtgtggcctgagagcccacgtttcttccatctattggcctgagcactccctcagttctttttatgtgggtctgtacatagagcatctcgtagcattggaatttgccttttcagtttgaggaatacagtacagaaatagataattaaacagaaaaacacaaaaagagagactgagggagcaagtaggaagaaaatgacagcttttagaaaaatatatatataatcttgagagttatgatttctccccctatatttgcgtgaaaattctaaccctcagagtaatggtactatgaggtggggcatcattaagtcctgaaggtggggtcctcatgattgggattactggctttaaaaaagataccccagggggctctctccctccttctgccagatgataaaacccgaagtgtgcagtctgcaattcaggagagtcatcaccagagctcagccatgctgacaccctgatcccacatttccaacccctacaagtgtgagaaattaagttctgttgtttataagcttcctagtccatggttctttggtatggcagcctgaactgcgacaaaaatgataccctatcattctgtactccattggacagaagctgaatttttgtccccaaagtgttgaaacaaaacaaaacaaaacctatgactaaaataagttgggttttcctaatgacaagaaacaacttgttgaaacactgaaatttcctttgcttaagagattttttaaaaatgggctgaagttggttggaactaatatggccatctgaagcctgtgaataataagcttgctgatgtcaggacccaaattatcattgcatgtttctttttcttttctttcttttttttttttcttgagacggagtctcgctgttgcccaggctagagtgcaatggcacgatctcggctcactgcaacctctgtctcctgggctccagtgattctcctgcctcagccttctgagtagctgaagttacaggtgcacaccaccatacctggttaacttttgtattcttagtagagatggggtttcaccatgttggacaggctggtatcgaactcctggcctcaagcaacccgcctgcctcggcctcccaattgctggggttacaggcttgagccactgcacccagcctacaccataatttttatatgttttgtcttatatacacctgataaattccctaggaggtagatgctagcataatccccactgtgtatggtaggaggctggggaagcccgaaaatagacaatggcttttactgagtcacagaaatggtaagataaacaaggttctgacccagctgtctcttctattataaaaccaaggctgcatttaggtcttcccagggaattaaggggaaggtgtgatttcataattacatacaaatggaggcctgacatgggagaggaggctgagtaatcagtagcctggcggggcctctggataggtcttatagtaagaaggggcccagtggaaggaaccttgaagagtctaacatacttccttggtgatggaacccaacagaacttaggaaaccaggaccccacctcctagagacaactctgtatccagcttctttggtgagagatgctcaagagagtaacatgctcttccatggtattcttacatttctgagttttagccttacaaaggctcaaagtaaaagccttctccgataatgcagatgtccacttagccctcatttctaatgaggtgcacccacagataacagggcaacccagaacagatccaggccagtcctctcttgtcgtttcatctagacagccccacaccaccccccactgccatgtattgcaggggcatcaagaggtgagggcattcttcctggacagaaccaggttgtcaaatgttgaaactcttgtgggtctgtcattttcatacccaggtcatggctggcaaaatggggacgaagtttatctactcagatgtgaatcccaagactttaagctgtcctctggtttccttcctggctgaagatctatgcagatgttcctatgtgcctgatctgaagagcaaaacttcaatagaggagtcatctatggtaaaaacaaggcaggcaatcaatcttttttagcttggctgctgggcactgtttacagagccgcattcagattaatgaggagctgtttgatgagtctaactcctccatctctttggaaaaagagcaggtgccctacaccactaaccttggccagcactgggctgtggtgagagcaggcacctagaggtctctatagctaggaacctgagaagaccaggacaggcccaggtcccagactgaaatatggaaactctctgacctctgtcctagggccttcccaggagtgactcatagtcctgtttcaatacaatctggccttcattcgtcccagtggcaacttggttaggtggaaagtctctgttcacatacttgtagaaatattagaggaaaggctttcatcttgttttcactttacatcaagccatgagcatttttgcatgttgctacagtttgtattgttttaactccccaccccaggcatctcctgtggcatgcagcttcagtcctacagaacttctccaaaacttaaaagccaacactatgactagggaagtttttatgcaaaaatgggggaatgtgctgtaccaaaaaagggggtgagactactttacgcatgttcctgcaatgtgtcatctcaagaactgatccccatatcccatcagggaaggaggtgtgcatgcacatgtctttataatattccataagtgaggctcttccccaccgtggttcagtctttcagtgctgatgcagcctggtataacatcctatttccatgtcagtcatgctgcagggaatattgtgtgtgtgtactaataggctgtaatcgtttgctaggactgccataacacagcatcacagaatgaagggccttaaaaacagcaatttagtttcttacagttctggaaattagaaatctaacagatgttggtggaatgacttctccaagcctctctccttggcttgtagatggctgtcttctaactctgtgttaacagaatcttctcttgtgcttctgtctttactacctcttcttataagaacccattatatttaattaggtcccatgccaatgaactcacaagcttaattacctctttaatgaccctgtgtccaaatacattcacaatctgaagcaatgctctttttgcctttgtaaaggaagtttgtctgtggcaaatgaataaatggcagaattttacatcatggggtcagtacaaaaaagggaggtgtgcaggggatttaggccactttccttatgttgggaactctaatgtcaccatctgaagggccacttatgaacagaagagttattatagttattatttcttttttattttttaaggtggagtctctgttgcccaggctggagtgcagtggtgtgatcttggctcactgcaacttctgcctcccaggttcaagcgattcccctgcctcaacctcccgagtagctgggactacaggcgtgtgccaccacccctggctaattttttttttttttttttgtattttagtagagacagggtttcaccatgttgaccaggatggtcttgatctcctgacctcatgatccgcccgccttggactcccaaggcaattcttttagccgatctttgtccttcacacagacataacagaggtccctgggtgctgaaagacgggcctcaggcccacttagatattttggaaggctgtggttaggctccattcactaaatacacgtatattaagcacttaacttgcgcagtcccttttgtagctgcttggcataattcaatgaagaaagcagataatcacagggcctcaattctatctgaagagttaaacacagtaaatattaacaggatgtccactgaatattaaatggtgatgtcctcacggcaattttaatctcctggagccaccaactcactccaattggaacactaattatggagtgtgtattacacatggtagtgcttttctgtgtttgttcacttcatttatgactaaacaacaccatgtctgatgtagagacgtaagagttgataaaaaaagaaacaaacactaccatgactgatgacatctccctagtgttcacctaaagaaattaacccaataagatcaataaactcaatgttaattataaaaattaaaagaacaacaaggccaggcgcaatggctcacgcctgtaatcccagcactttgggaggctgaggcgggcggatcacgaggtcaggaaatggagaccatcctggctaacacggtgaaaccccgtctctactaaaaatacaaaagaatgagccgggcgtggtggtgggcgcctgtagtcccagctactcgggaggctgaggcaggagaatggcgtgcacccgggaggcggagcttgcagtgagccgagatcgcaccactgcactccagcgtgggcgacagagcaagactccgtctcaaaaaaaaaaaaaaaaaaaaaaaaaaaaaattaaaagagcaacaaaggaaagattggcttagagttctccaattgaaaaaaaatgtactaaataaaatgttacaacatatttactatgaaattacatgttcaaattattttgcaagcaccattaaattttgtaaaaattattccaataattcccgagcagattatataaagaatactttataaactttggaacaagaaaactggccgggcatggtggctcatgcctgtaatcctagcactttgggaggctgaggcgggtggatcacaaggtcaggagatcgagaccatccaggctaacatggtgaaaccccgtctctactaaaaatacaaaaaaattagctgggcgtggtggtgggcacctgtagtcccagctactggggaggctgaggcaggagaatggcgtgaacctgggaggtggagcttgcagtgagcagagattgcaccactgcactccagcctgggtgacagagcaagactccgtctcaaaaaaaaaaaaaagaaaattatgcattaggtctactatcaataccaggcaagtaaaacctagatttacttaaggagattctgaactaggaaccacaagattttgaaaaaatgaattcaatacaaatgggaaaaatagatttgctttgaaattgtttgaggtttccagtttggtagtaacttatcaacactttaaaaattaccagtttgttctaacatattttctttcttctcaaaataggtacacatccacattcaaatacaattacttgcttcataattcccttacactttatctttagagtaacatatttgtatattaaactttcatgtaagtgaaaacttaaagagtctatgtgtgtctggaaggccacagaggttgcatgttcaaagaaaaatgtgagataacatcttctacatactcacttaagattcagaaatatatggcttttgattatatgcctgtgtaattttcataataatcatcttaatgactctataattagaagaaaaataataaaaatgtaacctatggaaacaatattctccaacgtatttgaagtttaaagtcactaaggataagaatcactagagatgccattccactatattactgaatagtatgttgttaccgtctgttacctagagacttgagtaaggtaaaataggttaatgttggtggcaggataacacctaattcaatgcacaactgtcttaacacattaaaaataattgttttattgaaactaagttcacacagtctaagaaaagcattacaaaatccactatactatctaatgtgcaattggtaaaacaatttactaaaatttgaataatgcacaagactattactctgaacatctatctcatgcagcacttacaagttttataagtcaaccacaaaagtttctctgtgtactttcttcacacacctcatatttcagtgtcctcaatcttctgttgaaaagtatgtaaatgacatcctaatatagaacttctcaaaccccgagcagcagaaattgaccacatgctttcatacagacactaggaataaagacacagcatcaagtaatttgagagttcaattacatcaaaatttgcctttgtaaaaatctaaaattctttcaatgcaaaaagtgtactttgaatataattgtttaagtctcaaaatattaatctcctatttctgtttaggctaactaaattatgttaaccttgaattactctttataatcaatgccctgatttagaataacattgaaagtgttagcgtcttagtggtttctactgtgaatcttctgatgttcatttagacttaattttttattaattttttatatttactgcatctgttaaatgctttcatataaactagcgttctttctttttttttgagacagagtctctgtcgcccaggttggagttcagtggcgcgatctcggctcactgcaagctccgcctctcgggttcacgccattctcctgcctcagcctctcccagtagctgggactacaggcacccgacaacatgcccagctaattttttgtatttttagtagagacagggtttcatcgtggtctcgatctcctgacctcgtgatccgcctgcctcggcctcccaaagtgctgggattataagtgtgagccaccgcgcccggccttaaactagtgttttctaaggtgtactttttaaacaatttttttcatattcattacagttgtagggtttctttccaatgtaaattatctaaaatggaataaaatttgagcaactgttagagggttacctttcagtataaattctcctatgtacaacaaaatctgtaacataagtaaaagtattgcaacaatctttatatttgtaatgtttttcttcagtataaaaactcttgtgtactctaaggcttatatttttgaagtctttccatgtacaaatgtaatgtatcactatcattacaccttgtgtactctaaggcttttatttggtgacatctttccacagataaatgtaatgtgtatcattacacttacattgcttttatctagcacaaaacctctgatgagtaagttcatagtagttattaaatgctttgccacattctttaaaatcagaatttttctcagcatgaattttcttctgtgcaataagctgtcagcaatggttgaagactttccccacattcttcacatttgtagtgtttctctccagtatgaattatcttgtgatttcaatgccttgagcaagatttatggaatttgccacattctttacatttgtaggatttctctttagtaaaaattcttacgtagtaaggtttgagcagtgattaaaagcttccccacattttttatacttgcaggatttctctcctctttgaactctcttatgttcattaagatgtgagcaccgtttaaaagctttgccacattcttcacatttatagcgtttgacggcagtatgaattttcttatgtctagtaaggtgtgagcaccgattaaaggcttttccacattcttcacagttgtagggtttctctccagtatgaattctcttatgttcagtaaggattgaggaccagttaaaagctttgccacattcttcacatttgtagggtttctctccagtgtgaattctcttgtgtttagtaaggtatgagaacctcttaaagactttgtcacatttttcacatttgtagggtttctctccgctatgaattaccttatgttcagtaagaattgatgatgagttaaaagctttgccacattcttcacatttatagggtttctctcccgtatgggttctctcatgtatagtaagtagtgagcagtggttaaaggctttcccacattctttacatttgtagggtttctttccagtgtgaattgtcttatgtttggtgagatgtgagtgccggttaaacgctctgccacagtcttcacatgtatagggtttttctcctgtatgaattttcttatgtctaacaaagggtgaacaccagtgaaaggcttttccacattcttcacatttgtagggtttctcaccagtatggattctcttatgtttagtaagactcgagcaccagttaaaagctttgccacattcttcacatttgtatggtttctctccagtgtgaattctcttatgtttagtaaggtatgagaaccacttaaaggttttgccacattcctcacatatgcagagtttctcttcagtgtgaattatcttatgataagaaaggcctgagtgagatttaaagactttgccacattgcatacatttgaaaagtttctctgtagtatgtcttatgttttctctatttagatttgatgatttactaaagactttcacacatttattatatgggaaaattttgctaggtagagttgacaaacattggttaagtccattataaatttctttttgatccttacactcacccacattttccccatccttccttaagtgtaaatcctcaagtccacagcttccatatcttctcagtatcactttttggaatgaatcttgcatgcactgttctggcaaaaggtcttcagtgtaatgagaagacatagctgaaatatgaaattaacaaaatatcccacttgttattttcagactcagatacatatactttacaaatctaatacagaaaattaagaaaaggacaggatgacttactagatgcagctgggaaacactcactccaaggagagaaaacaaaatgttgagtaaaacatcatactttaaacagatcttttgagaaaaagcttaattcagaggtaatgcagaaactgtggttgaagaggaagatgggaagcttgctcaaagtcactgggcaccaggactggctcgtagatccagaccagtcttatggaagggatatgtgaagaaaccccagggcaacacagtctagccatggacctctgagattctcactttggttccttctccttgaaaggcatttcccagctaaatctagtctgagctcctgattatagactctcatatgatccctatacatctgtgaactggcagggggagccacctggagaataggcagaggcacagcttaaactcttgtggaaatctgcagttttcactgtgctgtgcagctgtagctgaccataggtgcccatcctccgaggctctgcatcttgcactgaggggatccatctgctgctgtctgccaggctgagagagagcaaggttgtagctatcatgggactgaggtgaatctgatccatgcaccactttgcctgctggcaccgtccaagatgacctacctggctggtcctgcagaagggtgcccacagcatggcatccacttatatcacagatggtgcttgaccccaaagggccagaggacaaatccatgggcccagtgccaactgcccaggtcttcagcacactgcctgataatatcaagctgatatatgtggtctgagcttaagtggggtagaagcccacactgtcagcacacagagaagtcatgggatcatgagccagcatgggagctgagttccccttcattcacatgaataaactgggaagggtgtggccagatgaccagtcatggtttccatcccaggaagcctagcagcatagaacatctggaagaactcagcaatttcaatgcagatggcttgggacaagcctagccaattcagcctgctcccagggaagacactggagacagacctgctgagttgggggaccacaagctgggtgggccccacaactacctgctggactaaaaatcctgggctgcaggtgcaatactggttgcaaacccatggtgcaattgccctgcctggtgttccatcctcgagccatggcatcaccaaacgactcacagacacattccataacccatccttacttttgcaagcaaaggagaacagcaggacccctgataaatatgggtctcctggtgacctaaaagtgtgaactgtccctaaggaagggtaagcacagaccaccaaagccctccttggagcaaaggaattgggtgcagtgccagcagttgaagggaatatcaccaaggccccaaaataaatttggaaagaaaataatctctcacacactatcttccctccccagagcactcttaagtgccatctacttggactgaagcctgaattacaccaccaaacaagaatacattgcttcaacatgaagcactctatgaaatccactgcaggaacttatctacaaccaagggacctagacagaacctctgccctctgaaaacaaccttaaatgacaccaactgattatacacaacatacaccacagccaaaccctcaaggaaaaaaagaaataaaaaaattttaacaccccatccaaatgacagaaaattcaaaaggaaaagaagcaccagctccctcagatgtgaaagcgaaagaaagctggcaatacagaaagccagagtgtttcgttacctcaaaaggatctcactagttcctttgaaagaaccaaacacaactttaaaagttgaaaattttactacaggactttcaaaatacaattgaaagccttaaaaacagaatagactaagcagatgaaagtatttcagagctcagagactgctcctttatatcaacccagtcagaagatagtaaagaaaaaagaattcactacaaaaaaacaaagcttctgagaaatatggaattatgtaaaggggtcaaacttatgactcattagtattcctgagagagaaggaaaaaaagtaaccaacttggaaaacatacgtaaggatataatctacgaaaaattttcccatcttgctagagaggttgacacagagatacaagaaattcaaggaactcctttgagatactatacaagacaaccatcctcaaggcacatagtattcagactttccaaggtcaacatgaaatacaaaaataaaaggcaactagagaaaagggccatattacctaaaaaatgaattctatcaaacagtggacctccccacagaaaccttacaatctggaagatattaggggcctgtttttaacatttttaaagaaagaggccaggtgcagtggctcacgtctgtaatccgagctttttgggaggccaaggtgggcagatcacctgagttcaggagttcaagaccaccctgggcatcatggtgaaagcctgcctctattaaatacaaaacattagcctggcatggtagcgtgcacctgtagtcctagctactcaggaggctgaggcacgagaattgcttgagccctggaggcagaggttgcagtgagctgagattgcaccactgcactccaggctgggccacagagcgagactccatctcaacaacaacaaaaaaagagattaaaaaaaaaaaagaaattccaatcaggaattttatgttccagcaaactaagtttcataagcaaaggaggaataaaatatttctcagacaagcaaccactaggtgaattaactaccactagactggcatcacaaggtgcttaagagtgttccaaatatggaaatggaagaatgatacctactaccacaaaaacacacataagtacatagcccacagaccctacaaagcaactgtacaatcaagactacagagtgcatgaagggaacaaaaactaagatatcaatattaaccttgaacacagcagtctaaatgctccacttaaaagacacaaagtggtggccaggcacagtggctcatgcttgtaatcccagcgctttgggaggctgaggcaggtggatcacctgaggtcaggagtttgagaccagcccagccaacatggtgaaaccccgtctctactaaaatacaaaaattagccaggagtggtggcacattcctgtagtcccaggtactcgggaggctgaggcaggagaatcacttgaacctgggagtcagaggtttcagtaagctgatatcgcgcctgcactccagcccgggtgacagatcgagactctgtctcaaaaaatatattaaaaaatttaaaaaactggccagtgcggtggctcacccctgtaatcctagcactttgggagactgaggcgggcagatcaccaggtcaagagatcaagaccatcctggtcaacatggtgaaaccctgtctctaataaaaatacaaaaattagctggacgtggtggtgtgcacgtgtagtcccagctactagggaggctgaggcaggagaattgcttgaatccaggaggcagaggttgcagtaagccgagatcgtgccacttcactccagcctgccaacagagcgagactgtctcaaaaaagaaaaaaaaatttttttaattaaaaaaaaagacacaaagtggcaaatcagatttaaaaaaaaccaagacttaaccttctgctgacttcgagaaactcacctcacgtataatgacacccataaactcaaagtaaagggaaaaagtaacatctatcacacaaatgggaaaaaaacaaacaaaaaaatgcagtggtcactattcttgtattaataaaacagattttaaaccaacaacagtaaaaaagacaaacacattacataataataaaggattcaataaataaatagataaatcaacgatatttaactatcctaaatatgtatgcactcaacattggcacacccatgtttataaagcaattattactggacctaaaaaaaagacttagccagccacacaataatagcggaagacaacaccttacagatagcattacagatcatcaaggcagaaaactaacaaagaaattctggacttaaactcagcacttgaccatagacatctacagaataattcatctaatgaagacacacatacattctcatctgcgcacagaatatactttaagattgaccacatgctcagtcaaaacagatttcaaaaattcagaaaaattgaaatcatcttcttgaaacagagtgaaataaactcaaaactcaatagcaagaggaaccctcaaaactacacaaatatagaaaattaaacttgttcctgaatgacttttgggtaaacaatgaaattaaggcagaaatcagaaacttatttgaaacaaataaaaatggtgacgaggccaggcgtggtggctcatgtctgcaatcccagcactttgggaggccgaggcaggcggatcacgagatcagaggttcaagaccagcctggccaacatagtgaaaccccatgtctactaaaaatataagaaattagccgggcgtggtggcaggcgcctgtaatcctagctacctgggagagtgaggcaggagaatcacttgaacccaggaggcagaggttgcagtgagcggagattgcgccactgcactccagcctgggtgacagagtgagactccatctcaaaataaaaaaaaaacagtgacaaaatgtaacaaaaccttggaatgtggcaaaagcagtgttaggagggtttatagtgctaaacttttatatcaagaagatagatctcaagttaacaacctgataccatgcataaagaaatgagaaaaacgagaacaaagtaaatccaaagctagaagaagaaaagaaataattcaaatcagagcagaacaaaataatattgaaaccaagaaaaccattcaattaatcaaaaaaataaatttttctgaaagataaacaagatcactagatcactagctaagttaacaaagaaaaaaaaggatccaataagcacaatcaaaaatgacaaactatcaatagactaaacagacaacctattgggagaaagtatttgtagactatgcatctgacaaggaactaatgttcacaatctataataaatttaaatcaagccaggtgtggtggctcacgcctgtaatcccagcactttgggaggccgaggcgggtggatcacgaggtcaggagatcaagaccatcctggctaacacggtgaaaccccgtttctactaaaaaatacaaaaaattagtggggcatggtggcgggcgcctgtagtctcagctgctcgggaggctgaggcaggagaatggcacgaacccgggaggcggagcttgcagtgaaccgagatcgcgccactgcactccagcctgggcgacagagcaagactccgtctcaaaaaaaaaaaaaaaaaaagaaatttaaatcaacaagaaaaacagaaataattcattaaaaagtggtcaaaggacatggtcatttctcaaaagacataaaagcagccaagaaacatgaaaaaatgagataaaaagggagaaaaagaaggacaaacagcaacaaaaatcaaaacaataaaatggcaatagtaaccccttctctatcagaaaattaaaattcatggttcatggaataaacttcccaatcgaaagacataaactggtgtaaaaacaagattcaactacattctttttacaagatactcactttcaatctgaagaagacaatagactaaaagaagaatggtacaagtcattctattagaatgttaaccaaatgagaagaaactaggtcaaaattacataaggcaaactacattttaggtcaaaccctgttataaaatatactgtagtcaaaattctcacaagagacaaagaaggacattatataataataaaaagattaatttatatatgttatagaaaactataacatatatattatcatcagggttcccaaatatataaagtaaacattaacaaaattgaagaaatacacagcaatataataatagtaagatatttcaatatcccactttcagtaataagttataaagcaaggtggaatattaaatataagaacagaggacttcaaagcactctaaaaattacacctaatggacatatagcagaatacacagtcttctccatagctcataacacattctcttggatataccacttgttagggcacaaagccattcttagcaaacttttttttttttaattttgagactgagtttcgctcttgttgcccaggctggagcgcagtggcgcgatctgggctcaccacaacctccatctcttgggttcaagcgattctcctgcctcagcttccctagtagctgggattacaggcatgtgccaccacatccagctaattttgtattgttagtagagatggggtctctccatgttggtcaggctggtctcaaactcccgacttcaggtgatccgcctgcatcggcctcccaaagtgctgggattgcaggtgtgagccaccatgcctggcctagcaaacttttaaaaatggaaatcttatagactattattatgaccaaaatggaatgaaactaaaaattagtaatagaaaaaaatccacaaatatatggaaattaaacacattcttaagcatgctcgtgttcaaggatttgaagaattaatactgtacaacatctttacagtgcccaaagtaatgttcagattcaatgcaatccccttcaaattcccaatttcattttttgcaggaataaaaaagcaatgcccaaatcaaataaaatctcaagagaccatgaagagctaaataatctttaaaataaagaaaggtgttggaagcatcacacttcctgatttcaaaacacatgacaaaactacagtaataaatgcagtttagtactagcataaaggcagacaattagaccaatgaaaaagaatgtagcacagatattatctttcatgtatatggtcaaatagttacttgcacacccatattaattgtagcattattcacaaaaatcaataggtgaaagaaacccaaacttctctcaccaaatgaatagaaaaatacaatttataatatacaaataatggaataatactcagcttttaaaaagcagaaaattgggtcggacgtgtaggttcatgcctgtaatcccaggactttgggaggcccaggtgggcggatcatgaagttaggagatccagaccatcctggccaacatggtgaaacctcgtctctactagaatacaaaaaaaaaaaaaaaattagccaggcgtggtggcacgtgcctgtagtcccagctactcaggaggctgaggcaggggaatcgcttgaacctgggaggcggaggttgaagtgagccgagattgcgccactgcattccagcctggcaacagagcgagactccatctcaaaaaaaaaaaaaaaagcaggaaatcttctaacatgtacgataaagagaaatctgatggcatgatgctaagtaaaataagccagccataaaaagacaggattgtataaatccatttaaatgagacatctaaagtagttacactcagaaacaaaatagagaggtgtttgtaaagggtcagtcaagggggaaaatgagtagtttcgtgtatgttgagtttgagtttcccaagataaaaacatgtggagatacactgcacgacaatgtcaatatacccaatacaacagaactgtgtaactgaaaatatttaagattctaaattttatgttatgtattttgcacaattaaaaataaacaattacacctaaaataaagttataaagcttttcaaaaattaccttcaaatcacaagtgtttctctcacaaaaagaaaatatacatccaccaatgaatagatgttgaatttacaacaattctcatgactcctcatctaaacaggataaaaccatcactgatgaccaacaaaaatgtaaatataagagtcacaaacaaaatggggtaaaacctattcagtcaaacacagagataattaaattggtaataaacatatggctgattcatatctgacttttgcctcacactgtcttaaaatgtacagagctgaatactgtcatacaaaattataatatatgaataaaaactaaaaaatataatgaatgtcaaatggcctattataaaaactgtaacaaataaatataaaattgcaaagcaaaattaaaagaaactataacccataaaattctgaataaacatagtggagtactgatgaagaattcttctagatagctacaattttcaaccatgactggctatccataaaaagcatacatttttgaatcaagagcatacagttagagcattaatatttcacagaaaccccattataattattcataaaaagctttgagaaaataatttttaagaaataagcacttacataatactagggaaacttattaatatgttgctcttctttttacacaaaatggtaaggctgtaatctagcctgcagaagcaaagaaaagacttacatcttttactgtaagaacaatataaatattgtaaaatacggtataaaacactgattatgaattaggaataaattatgctatcattcagataaacgttgaggaatatagatgaaaatgcaaagaaagctttttacgtgcaggcaacttaattatacaaactaagccgggcatggtggctcaagcctgtaaccctagcactttgggaagctgaggcgggtggatcgcttgagctcaggagttcaacaccagcctggacaacatggtgaaactccatctttagaaagaatacaaaaattagccaggcgtggtagcactcgcctgtactgtcagctacttggggggctgagtcagtctatagagccagtctataaatatttattttataaatttccaaatgtcatccagagatcacagggcatagagagaagacaggaaatatattcctttaaaggaataaaatgattcttcggaaatcaatttttgagaaatgaagatccttgtattatctgacagggaattcaaaataatcattttaaacatgttcaatgagcaaaaatagaatgtagacaactaaacagaatcaagaaaatagtgcatgaggaaatgatatatcaacagagatttaaaaaactattaaaagtattttttaaaaaaacaaaaattgtggaactgaatacaataactaagttaaaaaaattattacagagccacaacagataacttaatgaggtaatagatggtatcagcaaattaaagacatttcacttataaatattgagtcataaaagcaaaataatactgccaacaaagaaaattttacctggaaaaatttacctctagaataaggataaaaaataaagactttataaggtaaacaaaagctgtcagtctttgtcaccatgtgtatagttctataagaaatggtaaagtaaatatatacacagatctacaattctctactataataataatgcataaaactgaaaatcttgccatagaatttaataaaccaaaacacaaatttgcataaatctgttaatagatacgcaatacgaaatgatataatgtgacactaataacaaaggatgtaaaaaggtatagttttatattcaactgaagtaaagatgagatttaagcatattgttatgtttcataaactctcatttttcaaggtgatcacaaaaatacctatagaagatatgcaaaagaaaatgaaaaaggaatcaaagtatgccactacaaaattaacaaaacaaaaacaaaggcagtaagagaggaaatgagggaaaacgtatttatgacaagcacagaacgtaatcgaaaacaaaacgcaactagtaattttatttctttctggtattattttaaatatgaacagattgaaccctttaaaaaagtaaaatagctgaatgagttaaaaacaaaatcttacaatatgcgtctttaggggactcattttagttttaaggagacaaacaggctgaaagtgacaggatacaaaaatatattccatgcaaacagtaagctcaagtgggtggggtggccatagttagacaaaatccactttaagtaaaaaattgttacaaaagataaagattggtattatataatggcaaaatggatccatttaccgggaatctataacacatataactgttatataactataacacatagcactctcaaatatataaaacaaatattgacagaaggtaagcaagaaatacacagcagcacaataattatagatttcacggcctcattctcaatcatgaatataaaaaaaccagatagatcaataagaaaataaaaaacttaaaacattacagaccaattagacctaagagacacatacagaacgttccagttaaaagcagcagaatacatgatattctcaattacacacagagcattctgttaggacacataacaagtcttaataaatttaaggagactgaaatcatacagtgtatattttctgaccaaaatggaatgaaactagaaatcagaagcagaagtaaaaccgtaaatccaaaaaatgtggaaattaaacccactcaaacatattcttgctcaaggatcagataatttcattttgttaagatgtcaacatgcacagccacgtacaaattcaatgtaatatctatcaaaatctccatggtagtttttattttttttttttgcagaaatatagttaagattctcaaattctttttttttttttttttttttttttttttttttgagacggagtctcgctctgtcgcccaggctggagtgcagtggcgggatctcggctcactgcaagctccgcctcccgggttcacgccattctcccgcctcagcctcccaagtagctgggactacaggcgcccgccactacgcccggctaattttttgtatttttagtagagacggggtttcaccgtttttagccgggatggtctcgatctcctgacctcgtgatccgcccgcctcggcctcccaaagtgctgggattacaggcgtgagccaccgcgcccagcctctcaaattcttttaggagctataactagcaaaacaccctttaaaaagaacaacaaagaggtattacacttcctggttttataacacattacccaaagctataaagatagaaataatgtggtattagcacaaagaaaaataaatggatgataaaacaaaatagctcagaattaagcacgtgtgtacataatcaaataaccttacataagattgctatggccacacaatggggaagaaaacagttttttcaacaaatgatgttgaaaactgagtatctacatgaaaaaaataaagttgagcccttccgttacatgcaccatataaaaacagtatttaaaatggattaaatacttgaacataaaaatataacaaacttcctagataagtatatgggggaaaatatgacattggacttggcactaatttcttgttacaaaagaccaagaatttgatgtcattttcttagctctgaaatcaaatgcataaggaacaaataatagagaaatgggactacatcaaacttcagaatttctgcacatcaaaggaaaaatttagtggggtgaaaatgtcacctaagaaatgggtgaaatatttgaaaatcacatatttgataggagttaattttcacaatatataaacaatgtctaaaactcaacaaaaagtgagttacttgattaagaaacagacaaataattgaactgacatctctccgaagaagttacataaatagcctataagcatttgaaaggatgctcaagattgctaacttttagaccaacacaaagtaaaatcacagtaaaatattacctcaaacccattaggagagccattaacaactgtaaccacccccccaaaaaaaagtgttacggatatggaaaattgagaggccttttgagccactggtaggcaaaaatgatgcaactactgtaaaaaacatactatgaaggtttttcaaaatattaaaaatggaattactatataatccagcaaacatggaaaatcctatttgatactgttcttggcagttattttttgaggtatgacaccaaaagcacagcaacaaaagcaaatataaataagtgggactgcatcaaactgaaaattttctgcacagcaaagaaaataatagaaggaaacttacaggatagaaaaaaatatttgcaagccatacgcctgataagaagttaatatccagaatatataaggaactcatacaaatcaaaggcaaaaacaataataagaatgataataagaacaaaactgaaaaacagactgaatggatagatatttttccagtgaagacaaagagccaacaggtatgagaaaaggacctcaacatcaccagtcatcaggcaggtgcaaaccaaaacaatgataaaatatcacttcacatttgttaggatgtctattatcaagagacacttatattttttgggtgatgtataccctaaaagcactgacttcaccaccatgcaatctatctgtgtaacaaggttgcacttgtaccccacaaattcatacaaacaaaaagaatagggctgggtatggtggctcatgcccgtaatcccagcattttgggaatctgaggtaagaggactgcttgagcccaggagttcaaggccagccctagcaacacagtgagaccccttctcttaaaaaaaaaaaaaaaagaaagaaattttaagcataaaaacatttttaaaaagagataacaagtgttgacaagtttctgaagaaaaaaatcttgtacactgttggtgtgttgtaaactggtagagtcattatgaaaaccagtatggacgttctttaaaaaataaaattaggccaagcacagtggctcacacccgtaataccagcactgtgggaggctgaggcaggcggatcacgaggtcaggagttcgagaccagcctggccaacatggtgaaaccctgtctctactaaaaaatacaaaaattagctgggcgtggtgacaggcacctgtaatccaagctactcaggaagctgaggcagcagaatcgtttgaacccgggaggcggaggttgcaatgaactgagattgtgccattgcactccagcctgggtgacagggtgagactccatctcaaaaataaataaattaattaaattaaattaaattttaaaaaaattccacataatccagcaatcccacttctgtgtatgtaaccaaaggaaataaaatcagtatttctaatatttgcatctccatgttcatttcacaattgccaagacatgaaaacaacctgaatgtttgtggaccctgactggataaagaaaatatgacacatatacacaatagagtattattcagccataaaaaaatcatgaaatcctgccaacatttcaacaacatggatggacctggaagacattatgctaagtgaaataagccagacacagaaagaaaaataatgcatgatcctcagctctatgggtaatctaaaaaggatgaactcatagaaacagagagtacaaagctggttgacccagtctcgaagtggggaaaatgggaagatgttcaatgagtatatacttccagtcctgaaatgaattaagttttggggatctaatgcatagcatcatggctatagttaatcataatgctctatatcaggggtatccaatcttttggcttccctgggccacagtggaagaattgtcttgggccacgcataaaatacactaacactaatggtaactgattagcttttaaaaaaatctcatgtttaaagaaagtttacaaatttgtgtttggccacattcaaagccatcctggactgcatgcagccagcaggacatgagttggacaaacgtgctccatatgcttaaattttagtaagacagcagacctttcactgcaaaagaaaactctgcatggtggcttaattccagcacttttggaggccaaggagggtggatcacatgaggccaggggtttgagaccagcctgtaatcccagctacttgggaggctgaggcacaagaatcacttgaacctgggaggcggaggttgcagtgagccaagattgcgccactgcactccagcctgtgtgacagagtgagactcgtctcaaaaagaaagaaaacaaaaaacaacaacaacaaaaaactctgtgaggttaacagatgcattcattaacttaactgtattaatcacttcacaatgtttacatatacaaaatcattacactttacataataaatagttatatacttttaatttgtgaaaagtaaccacacggtccccacacgtatatgtgtgggtttatttgtgtgtatatgtatacacacctcaactaatatagttgaagaatctgggaaaataaagtttaaattaccaattttagttcacactaaaaatataaaatgtagaaataaaataacattagattttcttatatttagggagatgcttagcattataacaaaattactgagtaggaatttttgtagaatcacatttgaaaattccataaggggctgggcacggtggctcacacctgtaatcccagcactttgggagaccgaggcgggtggatcacctgaggtcaggagttccaaatcaacctggccaacatggtgaaaccccatctctactaaaatacaaaaagtagctgggcatggtggtgtacgcctgtaataccagctacttgggtggcttaggtgggagaattgcttgaacccagaaggcagaggttgcagtgagccaagatggcgccctgcactccagcctgggtgacagagtgaaactccgtcgcaaaaaaaaaaaaaaattattaaaaaaaaaagaaagaaagaaacttcataagaaatcataaagcagaaaatacaccacatctgtttgtggtgttactgggattttggaaccaaataccgttatcacgaatactctcacacatttcagacataatacaaacaaaaacaaaacccaaaaccaaaacaaaacaaaacaaaaaccttaaaaaatagtttaaaggccgggcatggtggctcatgcctgtaatcccagcactttgggaggctgaggtgggtggatcacctgaggtcgtgggttcaagaccagcctcaacaacttggagaaaccccatctctactaaaaatacaaaattagctgggcgtggtggcatacgtaatcccagctactcgggaggctgaggcaggagaatcgcttgaacccaggaggcagaggttatggtgagccaagattgagccattgcactccagcctgggcaacacgagcgaaactctctctctcaaaaaaaagaaaaaaatagtttaacatagagttcctcaaaaatacacatatatttctgtgtgccccaagacaatgaaagggcagtcagataataaagtctcttataagccatgaagaggactttggctctcactataacctcaaagtaaggttactttttagagaatttaggagcattagacagaagatgcctctgtacaagagcaagaataaacaatcacgttcctcaaaaatcatctccattggagcagagcttctcaaataactcttgaagtctgtcttccttcttggcctttggagctttcacctgtggcatgtgtttcattcatccaacctacctgggggtttggctatggtctcatgtctcttcacattccagggctcctgtctttgctccagacggctaatcagttctggcttagaaacagtaagacctgttttattagaaaaaagtaatgtgattcttgctgggattctccaattaccaacctagtgttgtgctctgtagataagagagaatattatagatgattctagaaaattaataataaggacaggcgcgttggctcatacctgtaatcccaacattttgggaggctaaagcaggcacatcatgaggtcaggagatcgagaccatcctggccaacatggtgaaaccccatctctactagaaatacaaaaatgagcaaggtgtggtggcacgtgcctgtaatcccagctgcttgggaggctgagggaggagaatcacttgaacccggaggcaaagattacagtgagccaagattgcgccactgcacactccagcctggcaacagagcgagactccatctcaaaaaaaaagaaagaaaagaaaattagtaacaaaataatatttctaaacagaaagtttagaatattttatatttgtgggtctttagcttccctacccaatactacttaatcgaaaattggtggtagaagttggattttaaggtctggtcaataatattttataaaggaatttttataatggaattccaagaattaccactaaaggctgggtagggtagttcacactagtaatcccaacacttcgggaggccaaggagggtggatcacgtgaggtcaggagttcgagaccagcctggccaacatagtgaaacctcctctttactaaaaatacaaaaattagctggccgtggtggtgggcacctgtagtcccagctactcaggaggctaagacaggagaatcacttgaacccaggaggtggaggttgcagtgagctggattgtaccactgcactcaagcctgggcaacagagctagactctgtctcaaaaaataaaataaaataaaataaaaaaatagaattaccactaaactagagtgaaaaatgcccatcacctcaaggtagaagaaagttaatgtaaacataaaacatcttgaaaattttcttctctatcccaacaaatccccaagttttccttgaaagcagagatctaaaactcatttatacaaagcagaaatccccaccaaacattctacagaggaagaaaataaaatcttttgtgtgaaatagaaattgtgtattgaagttattctcacccagagagaccaggtttctgtagttctctagcatcactttcctatacaaactctgctgagcagggttcagaaactcccactcctccagagagaattctatggtcacatccctgaatgtcaacagttcctgaaaaacaaaacaaaacatagtgaccaactgtcaatgggcagagttcttgactccatgtgaaaagagagaattgctgtgacttatgagagttactggaattattcaatctgctatttttaacaaatatattctctgatgtattctctaacactgaggaaagaaaacagaatccatgtggccaggttcggtggctcacgcctgtaatcccatcattttgggaggccgaggcaggcagatcacctgaagtcaggaatttgagaccagcctggccaacatggtgaaaccctgtctctactagaaatacaaaaattagctgggtgtggtggtgcacgcctgtaatcccagttacttgggaggctgagggaggagaatcacttgaactcaggaggcagaggttgcagtgagctgagatcatgccatggcactccttgcctgggcgacaaacaaaaaggaaaacagaatccacaaaaccaatgtagatacttttctaaataatcactataaaattaagggcatcaacacaggcatatacagtttgagttttatgtctacagattatagaataagttgtaaatattattcatacagagaagtcatgatgggttagaaggtatctgtcaaattttaatgtacgtgacaatgaactacagatcttgttaaaatgcagtctgatccaggtgatctcaggtgaagcctgagtttctgaatttctaaaagctagccagttgataccaaggcatccgaatcaagaatattttgtcaaacacaaagtggttgagccccagtttatctgactagtaaacaaagatgagccttcattttccaaagcaagctttaagcaaagagaatctaaaaagaaagggaagtttgcagattaaatgtgatggtttatgtacatcagtcagtaaatctcccaaggtacttacgaataataaagataaaaataattaactttataattaaaaaaaatctgtcacagagagccttaaccaagtgattgaaattaacatgaattgggccaggcgcggtggctcacgcctgtaatcccagcactttgggaggccaaggtgggcagatcacgaggtcaggagatcgaggccatcctggctaacatggtgaaactccatctttactaaaaatacaaaaaattagctgggcatggtggcacgtgcctgtaatcccagctactcgggaggcagaggtagcagaattgcttgaatgtgggaggcggagattgcagtgagccaagattgtgacattgcactcaaacctgtgcaacagtgcgagactccatctcaaaaaaaaagaaaaaaaaaaaaagaaattaacatgaactacaatagaacaaattgatgtacagtgtcaacacacatgggcagacaatcatcagagctatgatattattggcaacaaaaagtaaattataacctgaatctaagcataaagaaacatctttatgcaaagttcaagctacagatatctcccaggttttataacctctaataatgtatttaagtagcctttcctcagcatttgaaagagcaagtcttatctaactattctcttttccagaatattctgagttattctgggcaattagtgacatcctctttaaatgtgcatttttaaaatcctgtttctggccaggtgctgtggctcacgcctgtaatcccagcactttgggaggctgaggcgggtggatcacaaggtcaggagatcgagaccatcctggctaacatggtgaaatcccatctctactgaaaaatacaaaaaattagccaggtgtggtggtgggcgcctgtagtcccagctactcgggaggctgaggcaggagaatggcgtgaacccaggaggtggagcttgcagtgagccgagatcgcgccactgcactccagcctgggcgacagagcgaggctccgtctcaaaaaaaaaacatcctgtttctgcatagagctgatggaacatccagatggaacctaaacaatacacattcccctcttcactaatatctgaggaccctataccatccctaatagagatcttaggtatctacacctttccacattgatgtgacacaaagagaactttatttatttatttatttttgagacagtctcactctatcgcccaggctggagtgcagtgagtggcatgatcccggctcactgcaacctcgcctcctgggttcaggtgattctgcctcagccttccaagtagctggaccacaggcacgtgccaccacacctggctaattttttgggtttttagtagatacagggttttgccaggtggctctggctggtctcaaactcctggcctcaagcgatcctcctgcctcagcctcccaaagtcctgggattacaggcatgagccactgtgcccagtcacaaagagaacatttttattcttacaggtcatacactcgatggtgagaactggtcatggtatgtaagaagcctggatacaaagaataaaggagaaggctctgatatataaaagagaagtatttttcagcgcctcttaactactatagtaagaagtaatatttataagaagaaaaggaggaaaaaaagtatctaaaacaaactggttaggtaggaacatcagaagtagagaagtaaaagtttgtaagttctaaagccaagacattcaagaacgaaaagagaacatcacccctgagctgggacacattcacctgagaaccagccatttcttcctcttgctcttccctttgggattccttctcaggtgatattatctggaaaatcacatctgtaacttgagcatacgccttttaaagcatcagcaaaaccccttcacctgctaccaccgcacccacaggcagatgtaccttaaaggcacagaaaaggccacacttgcttgtcctttgtcattgtcacaggagaatttcaggaacagtgagcttctacctaaagactaaaatgtgagtctccagtttcctgcctttagatgcccttccatgccagagatggcagcaatttctgctgcagcaaagggcccatagggccccactcccctgctcccatgaaaaccaagcacagcaggccccatgacctctctttaaaacaaagcctgggggctaggcgctatggctcatgcctgtaatcccaacactctgggaggccaaggcaggcagatcatctgagatcgggagtttgtgaccaggctgaccaacatggagaaaccttgtctctactaaaaatacaaaattagccgagtgtggtggcgcatgcctgtaatcccagctacttgggaggctgaggcaggagaatcacttgaacccaggaggcagaggttgtggtgagccgagatcgcaccattgcactccagcctgggcaacaagagcgaaactccatctaaaaaaacaaaaaagaaaaacaaaaacaaaaaaaaaaaacaaagcctggggaggctgagtcaggagaatcacttgagcccaggagacagaggttgcagtgagccaagatcgcgccactgcactccagcctggggcctgggtgacggagtgagactgtctcacacacacaaaaaggctgaactcaattctcacttatgtctgggagccctcatgattgcctctggctttatcttacaattacatgggacacttaattaaaacaatatggatgcttccacccaggccaacataatccgtcgagaggacacaggtaagggtatttcttcaaactggccatttaatcctaactagaatgtgatgagctgacaatcacttagctaagaattgcctcttaaactttaatattcggagaaatcatctggtatttcaagccccagactaatttgattctgcaggtttgtttgtttgagacagagtcttactctgtcgcccaggctggagtgcactggcgtgatctcggctcactgcaatctttgcctcccaggctcaagtgattctcctgcctcagcctcccaagtagctgagactacagtcacatgccaccatgcccgggtggctaatttttgtgtttttagtagagatggcctttcacgatattggctaggctggtcttgaactcctgacctcaggtgatccgcccttctcagcctcccaaagtgctgggattacaggtgtgagtcaccgtgcccagtcaattctgcaggcttgaaaggagtccacggattggcttcattcacagctaatgctgaccctgcttgccctagatcacttataacagcactcaactagacaaagcgccacagcacacagtcccttatacctacactcttcttagaacacaaatgcttttggtccaaaataaaaaccaccaatcactattctaaaacatggcgttctctgttggtcctttaaagtttccagaggcagctcatgtctgagtaagtctgcatttggaaaacaacacgcgcacatgcattaatgcgatgtttatggagcatgcgctgtgtgctcagaagcacactatagagcattgtgctgggaagatgacataatgtgaatttatcctcataacaccctgggaggtgggtactaactgtcccataattccctggatttatatgaaaagcccagcatttaaatttcttcttgttctatcactgattttttttttttttttggagatagagtcttgctgtgttgcccaggctggagggcagtggcacgatcttggctcactgcaatttccacctccccagttcaagcaattctcctgcctcagcctcctgagtcactgggattataggtgcctgccaccacggccagctaatttttctatttttggtagagatggggtttcgccatgttggccaggctggtctcgaactcctgacctcagttgatctgcctgcgccccggcctcccaaagtgctgggattacagacgtgagtcaccgcacccagcctttcttttgttttcttttttttttaaatgcatggaataggccaggcacggtggctcatgcctgtaattccagcactttgggaagccaaggcaggtggatcacctgaggtcaggagtttgagaccagcctggccaacatcgtgaaaccccatctctactaaaaatacaaaaattagctgggtgtggtggcacacacttgtagccccagctacttgggaggctgaggtgggagaactgcttgaacttgggaggcagaggttgcagcgagcagaaatcataccactgcactccagcctgggtgacagagtgagaccctgtctcaaaaaaaaaaaaaaaattaaaaaaaataaaaaagcttgaaataaaagctgaagatagacacaagaatgaaatacagaacgggaaaattaagtgtagttcaaagggatttctcagcattgggtttatatttactttcttgtgattcctggagcaactgctggatatgcaggaatagaaaatggtttgctaggtggtatgcctctagaaacagtggttttaattaaaaaaaaaaattaaagaccaaaaatatttagttatttgcttccatttatctgcttttgggtttggaagaattgtgaacaaccactctggagaggcagcaggagccaaactctgatctcctttaatcaactctgtatggagattccaaggtggagccggacctggatgaggcctcagaagaggtgaaacgtgggtaaggctgggacagggagagggccctaggtagaattctgatctccatgtcactggggtatttccaattctgtgttttctaagcctgcccaagagaaacttgactccccaggtttgtgtgattttaatctatttcacccaattccctgtctattttataacatacagtaacaaggaatttaaccaaaatgcatagtgttttctaggacatgtatattagaagctaaatatttagtcttcacaaggtaaaagcaatagaaataataactatagggctgggcgcggtggctcatgcctgtaatcccagtactttggaagaccgaggtgggtggatcacctaaggtcaggagttcgagaccagcctggccaatatggtgaaatcccatatctactaaaaacacagaaattagccgggcgtggtggtgcacgcctgtaatcccagctactcaggaggctgagacaggagaaaatcactagaacccggtaggcgaaggttgcagtgagccaagattgcaccactgcattgcaacctgggcaacagagcgagactccacctcaaaaaatagaaaagaaaaaataactataataacaactcttctgttcatgagtggcccttcagatggtgacatcagagttcccaacataaggaaagtggccctaaatcccctgcacacgtcccttttttgtactgactccatggtgtgaaattcagccatttattcatttgccacagacacagttcctggattgcagagattatgattgcctcatctgtttttctaatcgccatatgaaatgaaagtaattggttgatcagtctccagctctccttttttttcacccaagtgaaaactggaacaactcccatctaggaaccaaccaaagagattatttttgtgagaaagagaagaaacactgaatgacttattcccctccctcttagatggtagcagaattagaccctcttgtcagcctcaccccagtctgcacacaacaacctcaaatgtctcaaagactctcaggtgctgggaagagggtctacagtcactctgggttgatgtcctcatggcaatccaaacaggaaacactgagactgattctgtgggaacagaatagacaatagaacttccctggtagagcttcagatcctaaacccatatgtgatatcacctgtccttaatcagttagcttgggtaagaggaatgacaggaatattttattccagtatcacagcttacaggtaggtgtggttgttatggtcatggctgtagatattttgtggcctggaccccccactgctggggtgattctgccatcagattctatttacaccaagagcctctcacacaactgcagcaggtcagaggacaagatctggaaattttcaaggaccacactttgaagggtggggctctaaaatgtcgatgttgacctgtcacgatgcagaaaatgtttcctatgggctttctgtacattctcaatccaaagtcaggtcctgtctcatgagtcccagaagccagtgcttatatgcagattctagtgacatcaacctggctgtgcattattgggtgttatagcatgctgcgcaaaaccagaggagagatccagtcatggagactgctctaacacattataaatgatatgtcggccgggcacggtggctcacccctgtaatcccagcactgtgggaggccgaggtgggcggatcacgaggtcaggagatcaagaccatcctggctaatacagtgaaaccccatctctactaaaaatacaaaaaattagccaggcgaggtggcgggtgcctgtagtcccagctactcgggaggctgaggcaagagaatggctaaaaaaaggggaatagaaaagtgggccgataaaaagttctttgtcaaggattctcattagtttacaggaataacattgattagtgattggccatacagggttaagctagaaggtgtgggctatagtgtcctgtgtggcattattagattaatttatagctatgtgtggcagtaacaagcagtttcaagaggtgaatacattgctcaaaggagaagtaggacataattctggattcattttaatgtctctctgagcctgataactaacagaacttgcatccctcagataaaagttcttttactttctcaaatcccagggcctggattcaaatttgggggtttcagatttaggttgcagaggtatgggaaagtagcaggtgccctttgcacattctcaggcatttgtacaggaggaggaaaagaacattttaaattcttaggtctaatcaatgcatatgtgtaaccctgacagggtttgtctctgaattcatttcagatttgaagatgccagggacattgaaagaggtggaatggttggttgctgccctgtaaggttatttttgtagaaatctgatctgactgctctacaagggactatagatcacaaataggcagagagaccattttgcctgcaatttggggtttgcacaattgtgggttgtgacttgaagcccaagagggaaagaccctctagggtgaagtctgatgggtaccttacatgtttatatcatacctggtcatttcagacagtgttttcaaaaatgtaattaaaagcacaatcatctccaaccccagaaaaactctccacaatggcagaacacaaagcaaaaaccatatgattacacaattaagccagaatgtgacattaattgcaggcaatttgctaagagattgcaaagatagaaagaaggttgtcataattagtcctcaagaagaccacgtgacagcactcacttgtcgtagatagtttatcctaaacccacctgggaattggggaggtcagttgattatattctatgaaagataaacttcccacatcttcatgacaggaggtagttttgcaacttggagccaaattcaggtacttgctgaaggtagggttttacttctctgtagaaactgtggtgccaggtgcggtggctcactactgtaatcccagcactttgggaggccgaggtgggcagatcacctgagatcaggagttcgagacaagcctggccaacgtggtgaaaccccgcctttactaaaaatacaaaaaattagccaggcgttgtggtgggcacctgtaatctcagctacttgggaggctgaggcagaggcaggagaatcacttgaacctgggaggtggaggttgcggtgagccgagatcacaccactgcactccagcctgggtgacagagggagactccgtctcaaaaaaacaaaaaagaaactgtggaagagggatctatgttcttggctatttatatattaaatcaatggttcctgactcagagtactgggccatggtgcttctgcccatgaagcttagcctacagcctgcagcccacacagaccctcactgctgcatctgcgctccagcaccatgccacagagcagagccctgggctgcaggaggagggcctggagcactcctggttagaattgtattttcacaataatggaaatgaaagtggtgttccagcctaagtttctggggttctcttctttttgagatggagtctcgctctgtcacccaggctaaagtgcagtgacgtgatctcggctcactgcaacctccgcctcccaggttcaagtgattctcctccctcagcctctcgagtagctgggactacaggcgtccatcaccacgcctggctaattttatgtatttttagtagagacagggttttgccatgttggtcagactagtctcaaactcctgacctcaagtgatcctcctgccttggcctcccaaagtgctgggattacaggcatgagccaccacgcccggcctccagcctcagtttctactgacaacgatgacatggaaaaagtactactggatgcccagcaagaagtctggatggagttgctccacgagttgtcaccgtgacagcccacctcactcacagacacaaggaaccaacagagcttctgaaacacccaaggcattggagagaaaaacagttattagtctgtggaagattatattgacagaaagaaagaaattgaaagcatattgaaggaatactcagattagatatgggattggttaagtgagcaagaaaaaattccccccaatgtttctctttaaagaaccaaagtgcacagctactctcagcatgagaaacacacgcattctgaagaacagatacatattctatccagaatttctagaggtttttcttccatctttgctgctgtctcatctgctggccattggactagggatttatattggaagccatctaacaacatccaccagcatcttttgatgaggaataggaaaccaacgttgttcacatattggaattatatctgagcttgcggcatagctaactgaagagctattatatccgtgggtgggtgactgcatccgttgcatttattagttctgtaaatgccgcatgcctaagttagtaaaatgaaaaaatagggccaggcgcggtgactcacgcctgtaatcccaacactttaagagaccgaggcggacggatcacctgaggttgggagttcgagaccagcctgaccaacatggtgaaaccacctctctactaaaaaaattagccgggcttggtggcgcatgcctgtaatcctagctactcaggaagctgaggcaggagaatcacttgaacctgggaggcagaggttgcggtgagccaagattgcgccattgcactccagtctggggcaacaagagcaaaactccatctcaaaaaaaaaaaaaagaaaaaagaaagaaaagaaaaaataaggtcaggcccggtggctcatgcctgtaatccaagcactttgggaggctgaggcgggcagatagcctcaggtccaaagttcgagaccagcctggccagcatggcgaaaccccgtctctactaaaatccaaaaaccagccgggcatgttggtgcgtgcctgtaatcccagctactcaggaggctgaggtatgagaatatcgcttgaacctgggaggcacaggttgcaatgagtggagatcatgccactgcactccaccctaagcaacaggctgaaattctgtctcaaatacatatatacatatagacactaaaatcatgctgacctataatcatacctgttggattaattaataagcatattaattgatgtgacagaggtggggttaatatctattgtaacaatttgttactatattttttcctttttttgagacggagttttgctcttgttgccacggctggagtgcagtggcatgatcttggcttactgcaacctctgtcttcctgtttcaagcaattctcctgcctcaggctcccgagtagctgagattacaggcgcccaccaccacgccaagcaaatttttgtatttttagtagacacatggtttcaccatggtggccaggctggtctcgaactcctgacctcgtgatccacccacctcagcctcctaaattcctgggattacaggtgtgagccaccgcacctggcctattttcttttgatataagatataaatatcttaggataaacaattttaacatattagtcataacgtatgtagtattagaaaattatctgtaatattaattcagttaaaataatttatatttcaaaagaatacagaatatcaaaatcattattttaaagcagtttgtccaaaataaatattgtgctgttatattcactattgtacaaaatactgtttgtttgtttttttttgagatggagtctcactctcttgcccaggctggagtgcagtagtgtgatcctggctcactgcaacctctgcctcccaggttcaggcaattctcctgcctcagcctaccaagtagcagggattacaggcgttcaccaccacacccaactaatttttgtatttttagtagaaacgaagtctcactatgttggccaggctggtcttgaactcctgacctcaggtgatcctcccacctcagcctcccaaagtgctgggattacaggtgtgaaccactgcacccagccgaaaaaatactctttaatttaaatggatgcagtttgtctacacaagagtacatataactatgccaactgttcttaaaatataaatagaaaccaaggtacagagcgtactctgagctggtcttgctatcgcagcataagcccttcagcctgcacatattagtaattaccttggagcagcagttttctattgaaaacacctatcgtttttatctctccagatactgaagagatacccttctgtatctgtgaccctttagctttctggattgctgaattaaatcctatccttcgtgttttctgagacaaagttttgctcctattgcccaggctggagtgaagtgggcagatcacctgaggtcaggagttcaggaccagcctggccaacatggtggaaccctgtctctactaaaaatacaaaaaattagccaggtgtggtgacgggcacctgtaaacccagctactcgggaggctgaggcaggagaattgcttgaacccaggaggcagaggttacagtgagccgagattgtgccactgcactccagcctggacaacaagagtgaaactccatctcaaaaaaaaaaaaaaaaaaaaaaagatttacatatattttgaagaagcagagaaaaaaggtacatataaaagttttctaggccgggcatggtggctcatgcctgtaatcccagcattttggaaggccaaggcaggaggatctcttaaggccaggtgttcgacaccagttccgggaacatggtgagatgctgtctctataaaaaaaaaagaaaaaaaaaaaaaaaaaaaaattagctaggcaagttggtgcatgcctatagtcctaggtaactgggaggctgaggtagcaagactgcttaagcccaagagttcaaggttatagtgagctatgatcatgccattgtactctagcctaagtgaaagagtgagactctgtctcaaaaaaatcaatcaatcaataataaaagttttctaaattctatccttcaggaaaaggcaaaagaacaaaatgtcttccctcattttcaagtgggggaatgaagccccttatttctaatttgtatttgcttctgcaaaaggtaggtctaggcccatggtcttgaactactggacatctgacaactgaggggtggcgttgggcacactgtgtgcacataaaaaaagggtttgtgggggaactaaaaggcaaacgagggaaagttgctatctagaagccatgggtgggacagtgcagggttacggaaggactggttcatgctatagattgtgtcccaggagaggctatgctctgacttcttcctgtgtccatgcaggcagatgagactataatcaggtggcacagaagcctgggttggtgaaaaaaccaggttgccagtacagactacctttcaagctctactgataatttacacttaattaaaaactgaagttaaaataagcaaagaaatctttccaaggtgacaaactcaggaagcggcaatactgattggaacacagacatatctgactcagatgtcaagtcaagccattctatcatttgggacattttcccgccccatcctgctcactgaagtggacaataaccattctaccaagagccactgtgctgtgccccactgtgtcccttagatgcattttgctttgcaggtttttgcactgcctcactgggttgggtgttccttgtccttggggatattttttttctctcttcaccaatctgagaaaattttctcctcaatactagcatccaaattgcctggccagcactgtatctctaagaaatggaaactgggagttggggaagaaaatcttaatgtcctaatggatttgctttcagaggaaaggtatacctgatttctcccaggcacaatgcaccaaccactccacagagaggccacattcccatacctggcagggttgcccctgagaggagatggcccaggggctgatattcactagacacctcaggagacacagccactgtgggcatctcatgtcatccccagacagttctgaaactcaaaaccaggaaaataacacagggtggctgaggatgcattgccctgtgaagtttccaaagtggaacctcaacccaaaaacattctgataaggtgtctgtgcctaggaaagattaaagggagattggcacaaaggtttttgttttttggtctttttttttttcatggtggagtgttgggattattctctgctttcatctcctgtaaaatgtttgcaaatgaaaaacaattctttttctaaaaagtgccatccgctgctctttgaaataatgatcaatcaaaatactgtgtctgaaatgtacaaaaaaggactaatagttgataatgttgtgaattagagaggggaagttggtgttgaagaatgtcaggaaagaactgaaaatttaaaattcaactgcaagtcagagttaggctggggcaacagagtggtagctttgagattctgtttgtcacacatttggaaaatccaagagaaaaccacttctgtggagtgttaaataaatagcaggcagttagactgaggtggctctagtaccctgagttcctacattaaaaaaaaaaaaaatcaaaggcaaatacatttcttgtaaattgctaccttagggggaaacaaaattcagatttttcagatttaagcaaccacaaaccttcaattaacttctgattacataaccaggcaatgacaacctgaatagtctaaataagatgactacataactggaacgagtcagttactgaattcggtttgcttcatcctgcactttataaaaaactttccttcaagctcttcggctggacccccaaccacaaaccgtggctgggtgctctctgagcataaatcactgttaacttcaataagttttcaacattttaaaggtgactcccatagtttttaaacaggagaaggaaaagactgaggacccccgggatcacagcacttcccacgcacaaaccacacacggggtctggactctgccctgaggacgcttccattgtccccgcagtcggggcagacgcaagaacgcgcgcggctcttcccagggtgggctccgggcgggaagcgggagaacggaacgggatgcccgcccagggtcccggctgctggcccacctcgcatcctgtgcccggaggtgatcgacggccgagctgtgcctgccggggactccagtccgcagactccggagctgacagctgggaggccccagtcccgtcactgccggttccggccggtttcaaccagccctgcccccacctcgggatgcgcggcctggcacactcaccatttttcggcttccgggatgtcgtggagtcttagctctggatctcacagcatctgcaagtcagagggcaacagaggctgcgacagtcaccgggaactactagagcagaggatactaagcaatgaagatggaccctgagctctggctggagcgagacaaaggccccgccagctccaggacaccgccccctctaccttggctgcgcacctgattggacagttcccactctagcgcccatgattggatacagttccatgccccgccccctcaggtcatgagtgacaggaggcgtgatctgagaatgtgttgaataaggcaagagttacaggtttttcctgaacccttttctggcgcgcttccttcctgaattggaaactggcccttcctggggaacatttgcatttaactttgtatataaagttatctttatttgtgaatagtatacatatgttattcacaaatggaaacaatataatgacaattattttaaaatctcagatttcatcattttcctagcctccagtcttttgagcaggcagcctaagatgtcgcaagggaggcaattctctaagaaataaactgtgaagcacatatgaattttacattttctagtagccacattttaaaaaagaaaccaggcgtggtagcctgtgcctgtagttctagcaactagggaggctgaggcgggagcatcacttgaggccaggagttttaagaccagcccgggcaacatagcgatgatcccatctctacaaaaaataattaaaaatttagccaagtctggtggtgcacgcctgcagtcctagctactcagaaggctgaggcgggaggatcacttgaccctgggagaccaagactgcagtgagccacgatcacaccattgcactacagccggggtgacagagtgaaaccaagtttaaaaaaaaaaagatctctgaagaaggcattttctctttctgcaatttagccaagcagctgagtatgtcttgaagtcatcttctaatttttaacagggcaaggatgttttctaaaaccccagtctccagagttgccatggggcaaatcccggcagcatacatgaaaatcactcacagctaatgcattcttcatcagatccagtgcttcttacccctggcaaataaaaatcacctgcggggttgggagcggtggttcacgcctataatctcagcattttgggaggccgagacgggcgtatcacctgaggtcaggagttcgagaccagcctggccaacatggtgaaacccccatctctactaaaaatacaaaaattagccgggcatggtggcacacgcctgtaatcccagctactcgggaggctgaggcaggagaatggcttgaacgtgggaggcggaggttgcagtgagtcgagatcgcgccattgcagagtgagacttcgtggggagggtggtggtggcggcggggggtgtggagaatgactggaggggcggggcaggatgtaaacttaaaatccctgaagcccaagttgcaacagaccaattaaattagaatccttggagttggatctgggcaacaatatggtttaaagctctcagggtgattacagtgtgtagccaagtacccaaactactgcttttcaccaacagctttttcttttttttttttgagatagagttttgctctttttgcccatcctggagttcaatggtgcggtctcggctcactgcaacctccgcctcccgggttcaagcgattctcctgcctcagcctcccaagtaggtgggattacaggcgcttgccaccacgcccgctaactttttgtatttttagtacagacagggtttcaccatgttggccaggatggtcacgatctctcgacctcgtgatccacccgcctcggcctcccaaagtgctggaattacaggtgtgacctaccgcacctggccttcatcaacagttttgatgaattagttataaatggtttttcaaatgcatgtaaaaacgtttgctgctgagttgtgaccttacaatcttaactcatttcccacttactatactttgcagaaccaacctctgctactcgctttgttcctgattgaacctggttccatgtgtgctcagtgtatactatgcacagggcactgtgctgtgtgccctggtcccggtgagcatcattctcaggggagaaccttgctgaaaacaaaatcacatcccaaaaagttaaaatcatgctactggccgggcgcggtggctcacgcctgtaatcgcagcactttgggaggccgaggcgggtggagcacgaggtcagacgttcgagaccagcctggctaacgtggtgaaaccccgtctctactaaatatgcaaaaaatgcaaaaaattagccgggcgggggggcgggcgcctgtaatccgaactacttgggaggctgaggcaggagaatccttgaaacctgggaggcagaggttgcagtgagccgagattgcaccactgcagtccagccccggcgacagtgcaagactccgtctcaaaaaaacaaaacaaaacaaaaacaaaaaaccatgctacttaccgaattgaggtgaaaattaaaagacctagggggtcacccaaaggttagaacatgaatcaataacttggaatattaatatacatctgatggtgccctgagcacacatgtccattttattttattttatcttaccttattttatttttattttttgagacagagtcttgctctgttgccaaggctggagtacagtgccgcggatctcggctcactgcaacctctgcctcccaggttcgagcgattctcctgcctcagtctccccagcagctgggattacaggcatgcaccaccacgcccagctaattttttgtatttttagtagagacgaggtttcactacgttgggcagacctcgggtgatccgcccgcctcggcctcccaaagtgctgggattgcaggcgtgagccactgcaccccgccacgtgtctgcctttaaaagaaaacaaaataaagcattactattattctcaaatattaatttataactattatgcaaacatgtaatatttaaattttgattgatgtatagcatgcatacataaatatatgcgcaaaacatttatggaaaacttgatgaattattacagaccaaactcgtgtaaccaagaaatagaatcagacttgctcatgcccgacagtcactttctccttctcttcacaaaagtaagagcttaagagctaagtgtagatcaactttgtcattttgtacaagtgttttattacagagcattaaaaacatatccaaaatacaaagaaggtgtataatagacctgtcacccagctttaacagcaacttgacatgtgccatttttgtttcattgatatttcaacccatttcccatccctttattaattttttagtttttttttagataaaatgtatatacattgaaaggtacgatcttaactgtaccttttggacaaatcaactcactcatataaacatctcctcttttaagaacagaattactccacttaatcattaatgtacccataagttacctcaaagtattatttaaaatctagatttttataaaataggtctgagtttggactgagaattcatatttctaacaaagtacggatccatagagcacatggtaactacagagtctcttttatctaaagtaaatacaattggatgaataaaattaagaaaaattgacctaaggtgaaaggacaaatcaaaacatctgtgcaatatgctatctgtaggagcatttggttaagaaaaatataaactcaccaaaaagttttattattttaataatgcaaattggcaaaattcctactattgttttcatagaaatgctccctcacaataaaacattttcatataggaacggttacagtggctcacgcatgtaatcccagcaatttgggaggctgaggcgggtggatcacgaagtcaggagttcaagaccagcctggccaagatggttaaaccccgtctctactaaaaatacaaaaattagccaggcacagtggcaggtgcctgtaatcccagctactcaggaggctgaagcaggagaatctcttgaatctgggaggtggagtttgcagtgagctgagatcataccactgcactccagcctgggtgacagagtgagactccatcgcaggaaaaaaaaaaaagaaagaaaaaaagaagaaaattcatatcataggaaggcactggttaaaaatagcaaatatttgaaagtaaatgtcttataacattaagtagcagataccttttgaagcccatagatggcctttacatagttacccaaaattcagttgtttacacagcaagtgcagataatttttatagcttcctattaaattgttattaaaattaaatttattaattttaattaaattaaaattatatattaaaattatatgttaatgcccttacaaagttttcttctaaaattcactaacttaaattttgtatatgacatataagttccctttacattcaacttaaatttccttaattttattaggcagtgcctgtgtgtttaccacccagtattatttggggttcctccaacagacatcacggttggggaaacaggctgttcctgcttctttttcctcttcagggcatcagttcatcagtcaaccaagtcgtgtgggagtggaggtcatatattccctagcatagagggtgtcatttctgagcactctgctcagagtagaaaaagaccagaaggtccttttagggaacacttacttggggagggctaagccccttaaggtgtgagagctctaatcagcaggtatagacttttcaggagggagggatgaggcagccattctgaacctggagctccatcacctcttgtcccatctccagacaattctagagggctgttcaggaacatgtctgaaaggtgcacatggaggaacagtgtgggctttgatctggcttagatgacgtctgtcctggggaggcaggaggtccatgctcagtatctgggctggtatctttgaggtcagtaggttgcctttttgtatccaagtccattttcactagggaagaggccagacagtctaaatggcttccagagcccctctctgattctctttgggagatagggtctgaaagaggctaagtcagtattttggggaaattctacaaagtctggttggaaactgggaagacctcttgcctggtgcttaaatgctccatttgcagtcctagccatataggtgtttggtagacatagagctgggtttgcatttatatcagcacaaccttatgtcagagctgaagaagtggccaggataagtgtcttggttgcaggctggagaacatcataaaagcaaactgctagtttgctgattttcatcttggcaatgagcattgagtcctggccaaactgcttgagtgcagcatgaggccaattcataaatccacctccacgcatcagctgtccataagataagaggaagctcagttcatgttttgacgagaggctctgccatgtgaaagaatcacatctcaggtgtcttgacagctggctgacttgtgagaaaagatccaggacagatctatttttggatgcatcgacaggcttcagccttccagaataatgtgggagaaatggcttgcaaataaaatatggtaggaactcctgataatgaagagtaaaaacatgaacttaataaaaataagacagaacctataaaaacatgccatagtaaaagaaatacaaatggacttttctagcataaagaggcattcaaccataacggtgatcaggagaaaataaattacaaaataaatgtgttttgttggtgtgtgatcagggatactaatctgcgtctttgtttgggtttcattttgagattgaggatgggaaatggcttgtagccctcagggggctttgagaaatgtggcaatcatccccaagagctatgttcttcatgttcattcttgacactggctgaagagcctcagctgagagaatgacccacaaatacaggttagggatagactatggggctctgtgcttagagagaggagagtcacctaaactcctctttaccacagcccaatccaaatgagggtaattccaaagaaactaaactcaaagccagaaacagcactgctaggttaggcaagaatttgactcttccaaggtgaggagaaacagaggatggattaacacagtcttccctgggaaggaaactgggagttattttagcaactagggccttatagatcctggactctgtgtaaaaagtaaagtagaggttcctcttcaaagactttcctccccatctaattatgaataaatagtaacttctcttagaagcaaaatttattcaaagacctgtgctcctaaatatttgccctggcatgcttatactggtccaagcaagcattaggtcatagcctgttcctcttccttatttaaaagtgtttttacctttctcagcattccacaagttacttcctacttcctttgttctcctctacctttgtctcttttaaaaagttctaagttgctagccaatcgggacaaatgcagaatgtgaggtcccattccagcagtagggtggatacgtcaggttataaataaccctgtctcttttgttcgatgtactcttgtggcaaaactgctggcgagtataccctttctgcaggaagtaaaaatgcccttactaaataaattaaatttatgttcaagggctatttctttacggcactgaaaaacaaacatttcaaatactctggaaacagaaaatgtagctcctgcagaaaaaataaagatctgctacttctcagacacttttacactcattgtagtagtaaatgacagaacctgtggtggtcctaggaaaaaaacttgaacaatgtactcagaatggcgaactctgggttttcttgagggccaagactactgacatttcatgtgttatatttcatgtaagacatttgatgtcttttggataccttatgacagttatgcatttctttataatcagaaaaaaaattagcatgtaatcatgcatatatgtttgtatattgtacaatgtatcaaaatgaatatgtatatttatattctcccccttaaattcagaaaaagctgaagctctttactctctcagcctgagtccagggaggacggatatccacaaattagtggatacaaactaattagcattctctaatagagaagcgtttctattttttgcagtttgataaactcatggtgaaattaccatgctactttttttactttttattatttaatataaaatctaagacaagatacattaagtacttagtgacacacgtatttattcctcacctgattcataatatctgcctaattttaaactttcttccattttataggttcaattgatcttattttattgtaggatattaaatctaataccagcattgttattttatatattatgttctttaattttgtatattttctattggcattttacactgaaataatgcagtgtttcatcatataaatgactttatctgtatttaaaaaataaaagtctggggccgggcgcggtggctcacgcctgtaatcccagcactttgggaggccgaggcgggcggatcacaaggtcaggagatcaagaccaacctggctaacacggtgaaaccccatctctactaaaaatacaaaaaaattagcggggcttggtgtccggcgcctgtattcccagctactggggaggctgaggcaggagaatggcgtgaacccgggaggcggagcttgcagtgggccgagatcgcgccactgcactccagcctgagcaacagagcgagactccgtctcaaaaaaataaaataaaataaaacaaataataaaataaaataaaaagtatttgggtattttttttttggtcttataatttccatattacatagtgatgagataaacattaatgttttgagagtattttaaacttttgataatgactcatttgatccacatggaattttttactgcatgtgtgggttgaaaatctggttttgttttttgtttccttctttgttcatttgttgagacagagtctcattctgtcgcccatgttggagtgcagtggtgcgatctcagctcactacaacctccccatcctgggctcaagtgattctcctgcctcagcctcccaagtagctggattagaggcacgcaccaccacgcctggctaatttttgtatttttactagagatggggtttcaccatgttggcaaggctggtcttgaactcctgatctcaagtgatccacctgcctcagcctcccaaagtactgggattaaaggcatgagccatggcacctggcctgaagagctgatttcgcttctgcttcatcttcaacctgatctccccagaactgatagctcttgctgtaactgggggatagcagtttattattccaataaatgtggcaaattcaataacatactacaaatcagttggaaagcaggacatgccttcaagacatacacaacatgcaccaacctatgtacaacaataataatttgtaaatttcagttggaatggaaaataaaatgacaaaaagattgttaaggtaaattaaaatggaggtcaggcctgaagaattcctgagcagaccaaatcagttaggcctcataagtaacctcaaccttgcttgatttccaaacataagcaaaacttaacttgaattctttcttgtagctgcctattttaaagaaaaacagaaatgaatctcaaccaatcagaagtagccaacaaccttatatagctaggaacttttcaacaaggcaaagaaaccaaaaaccgagaagaaacaagtttctaactaccactaattgagtaatttattttgtttctacattttcccaataaatagttgcctcttacactgtcaatgaaacactaaacctcttttagactggtgtcctataattaatcaattgctcctactcaaactctttacaattttattgcgtctcagattactttttagcagaataaaataaactatctaggaatccatattacaaaaacgtttacagaatatcagaaaagacagaatgttcatacaatatatgaatgtagacataagcaaatagaaaacttacatgttcttaggcagaaaaactcaatatactatcaatatcaattgtctttaaggtaatttagaaatttaattttgttctaatatagatatcattagatattgaggtaggcattttactataaaatagcatataggctgggtgcagtggctcacacctgtaatccagcactttggaaggctgaggcgggtggatcacctgaggtcaggagctcaaaatcagcctggccaaaatagtgaaaccccatctctacaaaaatacataaattagccaggcatgatggtggatacctgtaatcccagccacttgggaggctgaggcgggaaaattgcttgaacctctgaggcagaggttgcactgagccgagattgcaccactgcactccagcctgggcaacaaagcaagactctgtctcaaaaataaataaataaataaataaataaataaaacagcatacagatgaaaagccaagaaaagccaagaaaactgtggaaaaaaaaacacacacaacaaaacacagataatattggccagccgtgggaaaaatcttgattgattaaaaaagctaataatagatcattggaactaaaaattcagaaatagactaaagtgcctaagaaactgtcttagtccatccaggctgctgtaacaaaataacttaggctgggtaatgtaaaaacaacagaaatttatggctcacagttctggaggctggaaagtgctagatcaaggcaccaagaaatttggtgtttggtgacggcccagttcctcacagatgataccttcttggtgtgtcctcacatggcaaaagagacaaggacactcccttcaacctcacttattccattcaggaagatgaagctctcttggtttagtcacttcccgaaaggtcgcatgcctaatactatccacatatgaatttggagggggacacaaatacttaaaccacagcaaaaatttaataagcaggaaaaactagtggaggatggcatcactaatacttgacgtgtgaaaaaccgatgttcctatcacaaaggaaagaaatgactcattcttcatgacatagaacaaaataaaggtccaatgaaagataaatctatacagaaaaataaattggtgttgataaggtgaattctacaggttgtatcaggattttggaggtttctggggatgggcagggccccagagtttcctcctgtgacattttccctgaagttgctcacgctcttactcaatttgaaagtggataaaaatgttttttcctgttctaatatttaagaaattcaaaacaaaaaggcctatgtatgcacgattatcaaacaatccgtcagtggtgctctgctaaggaagggcaaagaatcccacatccacaaaagtacgatgttctgtcagataaagatgtctccctgtgccagagccacatattttacacatgatcagaggctttcccagggaagcattgctctgcagcccttccacagacttaaccctgagaatttgacttagaagatcactgatgaacacacgcccaagcgttctgatctacatgaatcctctcttaatggttccttccagggatctgggatctttcccaaagtcatctgtcacacacagattgactcaaaaatgtggacaaaagctttgatcctcactggcacacctgctctgtcttatcagcttctctagaagtatgctgctctaattgctcctgagagaccccatcttaaggtatctctctgtgccaacataattgatttcataaagtgggaagagaataggcaagagtcaagctatgctgggggctgtctaagattcccttacctatgtctctaatttacgcacatattgactaatacagattcatctctaagtggtaggaaatgggaaggaggagccccagttctcagaaagagaagccccagttcacagaaggagaaaatgtaatcaatgctgcctagcttccagcttcagcttacctatgggggactgagtctcttctgaaaaaagcagctgttctccatagtattagcctgttctcatgctactaataaaaagacatacccaagactgggtaatttataaaggaaggaagtttaattgactcacagttctacatggctggaggtgggcggtcggttcaaaatcatggaggaaggcaaggagaggcaaagtcacatcttacactgtggcaggcaagagagcatgtgcaggccaactgccctctataaaaccatcagatctcgtgacatatattcactaccacaagaacagcttgggaaagacacacacccgtgattcgattacctccctccaggtccctctcatatcacacgggaattatgggagctagaattcaagatgagatttgggtggggacacagccaaaccatatcatccatcatttgaaggaactgtggtctcaggaagctaggcattgagtgtgcacgctgccccctagaattccacacctacatcacagagacagaatagtctcaaaggattcttaagggtaatatgggcagccaaaaggaggagatgaattcacagcctctgccttaccttctggtctaacaaatactactcctatcctggcccaaaaggattcccatactcttttctgggttgcacaaggagtaattcagaaagacaaaaacttattaatgccccttcattctccataacttctgaggtaagttgttcattccctgggttttaggttgttgttctctctctacctccacagaaccagtgtgtcccattccattacctataatttcacccatattcttcttacctcctactttctcctagacattttatccagtagagccaggtgaaatacagacaagtatatttacacaaaacttaaccagaactaagttggagtcccataagccctattgggctgcgatggcactcaggctggcctaaggttgtggttatggaaaagaatgccacattttgcccaggaatgatcaatgtggaatctcaaatttgggaaatagatccttagagcccccaaccgtttcatccttctcttggaggcaatcaggaagagataatccccttttggaggaaaccatgtctaatcaacaaattacctaaccaacatgtgtggaaaaggaggtaaaatcagacagttgacccattttagtagatttggtaataaatgccacaaagtcagagttcaagtggtctcaaaagcctaaaaggcgacacagattagtttcaaggaacacatggtgtcactgagtgttccaacttcccagagggtgagtaccatggcaactttgagcaggctgggaaacgatcccagacccttgagggtctgtgagaaatcaaactttcggcactttggaagtcaggaaaccagcacgttgggggaggcgggatcacagttacttgctgagacaagctgccctggctacgttcactcccgtcaggtaggagaggttaaagaacaggaaggctccccctccgcagggcggaactgctctgaaggcatggaggagcgacgctgaaggtggaggcttcgcccaccatgccgggagctaaaatttcttaaccaatgccggccagcgatggcagggctgcgggactacaatcccagcgcgcacagggatcagggactgtgcgcatcactggaagaagcggcagaacggcgcgcgcctcgctgagctttctgggagatgtagtctcatggcaactcccagccttttggccacaaggctacgggacctacaatcccagcctgtaccaggatcgggagcagttcgcagcactagaggaaggggcagggcggtgcgcgccgcgcctgatatgctgggagctgtagtctcttcacggtttttagccaatgagtaggtagcttcagaactacaatcccagtatgcatgggggcggtgcgtagtcctggaggtaggggctgagaggtgtggacttaccggtgtccaaagcattgctagcagccaattccatgccgccccgttgccagggagagtgaatacagctagggacgtgaagggtaggtctgggctgggcattgaggagggtattaggctaggaagtatacctcacctttgtccaaatcgggtggttcggcctcctctcattggccctatgcagctgggttgcctctctcacccgcacccaagggtctttccagagtgttgcgtcatttccagcccagggagctgccttctttcctaaactgcaatggaaactgtcctgatgtctgagacaatgtccgttgtgccgcagccctctgccttctctagccagagcgcgagctcagctgcttttgagagaaatcagccacctggcccacctgtgcacaacttcagagctttgtagggggtgacaaggactgtgtcttcagggaaatgtcacgggcattagcgcctttttcgcaaatgtgaaagttgagaaatcaagaaggttaattattgggttgcccaagatctgctaagagcaaaggagaaaactccgtttcccaggcatgtgtcttgtgagccatttttaaatcaaccctcttaagtggacaagctccagaacacaacatgaagctgatgatgacttaggcaatttatgcttgaactcattggcctcatctcaagtcagtgtctcagagacacaggtgggacctgatccccaaggaacagatagcattccagattcatgggagcaacttttgagatgtggagcacccggggggtcatttgaaacccatcaggttgccgggcgcggtggctcacgcctgtaatcccagcactttgggaggccgaggtgggtggatcacctgaggtagggagttcgagaccaaactgaccaacatggagaaaccccatctctattaaaaatacaaaattagtcgggcatggtggcgcatgcctgtaatcatagctactcggaaggctgaggtaggagaatcacttgaatctgggaggcagaggttgcggtgagtcgagatagcgccactgcactccagcatgggcaacaagaggaaaactccacctcaaaaaaaaaaaaaaaaaaaaaaaaaggtgtgtgtaatcttcagttttcaagatgattacaaagataatatttatagaaagtatgcaaaataaaatacaatcaaagcatgccaatagaaagttaaataaaaattaagaaagtaaaacaggctgggtgtggtggctcacacctgtaatcccagcactttgggaggctgaggcgggtggatcacaaggtcaagagatggagaccatcctggctaacatggtgaaaccctgtctctactaaaaatacaaaaattagctgggcttagtggcacgtgcctgtagtcctagctactcgggaggctgaggcaggagaatcacttgaacccgggaggcagagattgcagtgagccgagatcacgccactgcactccagcctggtgacagagcaagactccgtctcaaaaaaaaaaaaaaagaaaccaagtaaaacagaaaatgagaaaaatataactactagaaacacataaaacaataacaatataactagtaataacttcatttccttaataaattattttaaatataaattaagtaaactacttaataaaatgaaatgtagtcttaggactttggaaggccaagatgggctgatcacttgacctgaggagttcaccaccagcttgggcaacatgggaaaactctgtctctacaaaaaaatacaaaaaagctagctgggtgcgatggcaaatacttgtaaatcagctacttgagaggctgaaatgagaggatcatctgagtttgggaggttctggcagcagtgagccctgcaaatcagcctggttgaccgaatgagaccctattgaaatacaaatgaggcctggcgcgttggctcatgcctgtaatcccagcactttgagaggctgaggcaggcagatcacgaggtcaggagttcgagaccagcctggccaatatggtgaaacccccatctcgactaaaaacacaaaaatcagccaggcattgtggcacgtgcctatagtcccagggacttgggaggatgtggcagaagaatcgcttgaacccgggaggcagaggttgcagtgagctgagattgtaccactgcactccagcttgggtgacagagtgagattccatctccaaaaaaaaaaaaaaaacctacactgaaaaaacacactaatatgaaacttcaaaacaataataagagaaatgtttactctcataaaacctggtatgcaacattgatgtatcattaaaaaaaacttgtcaggctgggtgcagtggctcacacctgtaatctcagcactatgggaggccgaggcgggtggatcacctatggtcaggagtttcagaacagcctggccaatgtggtgaaaccctatctcatataaaaatataaaaactagctgggcgtgatgacgtatgcctgtaattccagctgcttgggaggctgagacataagaactgcttgaatccaggaggtggaggttgcggtgagccaagattgcactactgcactccagcctgggtgacagggtgtcactccatctcaaaaaaataattaaaaaatatttgtctcagtaactgcagtatttagctgttactgtgtacttattaaatgcaggtattttgaatcattggcatgcactgtgtggcaatagaatttgagagaatatgcagtatagttataaatagattctaatgagaaacttttaataaaaaagcatttaaaaaactagagttactttttatgttttaaatatacattattcttacacaagatgaaactgctgaaatctaactttagaagcaaagaatagccttacttttttttttttttttttttttttttttttgagacagtgtcttgctctgttgcccaggctggagtgcagtggtgcgatctcggctcactgcaacctccgcctcccgggttcaaacgattcttgtgcctcacccttttgagtagctgggattacaggcgcctgccaccatgcccagctaatttttttgtatttttagtagagacagggtttcaccatgttggtcaggctggtctcgaacccctgaccttgtgatccacccgcctcggcctcccaaagtgctgggattataggcatgagccaccgcgcccgacctacattgttaaacatagaaaaaaaaaaatatatatatagatatatattttgcagaatagggttagaccctctgatgtgtaaaacatatattaggaaataaactatgttattatttagttataggctgaagaaagtagataaaaatcttataattccttattgcctgcagcaaacttaaatttataagtaactattttagtaaatatggagtgcctactaattatctcatttacttctggcataccatgcaaatcatctcacatctcacatctcttcatagtcaaaggtttttttttccttgctccagacaggtgatcaggtcttgcttagagacaacaatacctgttttattaaaaataagaaacataaatcttgctcgcattctctaattacaagctagtaatgtgctcggcagagaggatgtgataaaatagtctagtaaattaatacaaaaatactaagttataaaagaaatttctaaatatttagaaaatactttcaatttgtaggtttcttaattttactatctggtactattgaatcaaaaattggtggtggcaattagattttcaggtgcggcaacaatcaatattttatgccactaaatttctggaattgccactaatttacagtgaagaatacagctcaactcaggaatgtggaaagttaggattacgatgaaacatcttgaaattcttatctaaatgaacaaattttgaagattttctgggaaaaggggatctgaaactcttttatgcaaagaataaatgactaaaacacattctacaaaaatgagaaataaaacctttagggtatattatgaattatgtactcaagttatcctcaccaaggaagatcaggtttctgtagttctctaacatcacatccctatataaattccactgtgcagtgtccaggcaatgccactcctccagagagaattctatggccacgtctctaaattgcaatggtccctgaaacacacccacacacccacacacccacacacacatacatttttaccatgtggccatggacagaacttttaatttgacttaaggtgtaatgacaaagtaaagagaactggctctgacttatgggactgactaaaattatccaataaaataattttcaacacagaaatattctctaatgtattctctaactgagaaaaaagagcagcataagatccacaacatcagttcttataatgatatttttctagataataagtataaaattaagggcgtgaacagaacatgtgtatatatatattttttttttggagggggatggggtctcactctgttgctcaggctggagtgcactggctcaatctcgactcactgcaacctctacctcccccaggtgcaagagattcttctgcctcagcctccctagtagctaggattacaggcatctgccaccacgactggctaatttttgtatttatagtagagacggggtttcactatgttagccaggctggtcttgaactcctgacatcatgatctgttgggaacaggatccccaaaatctggccataaactggccataaacaaaatctctgcagcactgtgacatgtttgtgattgccatgatgcccacgctggaaggttgtgggtttaccggaatgagggcaaggaacacctggtccacccagggcagaaaaccatgtaaaggcattcttaaaccacaaacaataacatgagtgatctctgccttaaggacatgctcctgctgcagataactagccagactcattcctttacttcagcccatccctttatttcccataaggaatacttttagttaatctataatctatagaaacaatgcttatcactggcttgctgttaataaatatgtgggtaaacctctgctccaggctctcagctctgaaggctgttagaaccctgatttcccactctacacctctatatttctgtgtgtgtgtctttaattcctctagcaccgctgggttagggtctccctgaccgagctggtctcgggaatgatccacctgcctcagcctcccaaagtgctgggattacaggcatgagccaccgcacccagcctcacgaacgtgtatatttttcagtgctatattttcttcatatggaatgagttgtgaatatttttcagatggaaaagacatgttgtgttagaaggcacctctcaaattttaatatgtacagtaagttgaagaccttgttttgcaggtttcttttttccagaagatctttaataaagtctgatttttaaattaattaattaattgattgattttgagatggtgttttgctcttgttgcccagcctggtgtgccaccacacctggctaatttttgtattattagtagagatggtatttcaccatattggctagtctggtctcaagctcctgacctcatgatccacctgtccaggccccccaccaaactgttgggattccaggcatgagccaccatacctggcatttttagggaaattttattagaaaataaatatgtacacttagcaaggtaaaggaaatacaaattttacagccgggtatggtggcttacacatgtattcccagcactttgggaggccgaggccagcagatcacaagttcagtagtttgagacaagcctgaccaacctggtgaaacaccatctctactaaaaatacaaaaattagctgggcacagtggcaggcacctcacctgtaatcccagctactcaggaagctgaagcaggagaatcacttgaaccagggcagcagaggtttcagtgagccgagatcacaccactacactccagcctgggtgacagagactccatttaaaaaaaaaaaaagaaattataataacaattcttctgttcctaaatgtgccttcagatgtagaatcagaagtcacaacaatataaagaaagtggcctaaataaagcccaaggtgttggacacatctttttattgtaccaaccatatgatgcacaattcaattatttatccagtcgctagtgtagactaaaagtttctggattgtagaaactatgactgcttcatgtattttttttaatggccatgtgaaattgaagcaactagtttatctatttcggtcttcagatctcctccttctttattatccaagtaccaggaaactggagaaactctcatctgggtaccaaccaaagacacctcttgtatgaggggatgaacaaacacagatgactcatttctcatacactgagacagaagcagaattaaccactcttgtcagcctgacacaattctgcattgtacatcctcaaatgcctcaaagacacctaggtgattttgagggaattcccagtgaccctgggctgatagtccagtgataagccactctggagagactcaggctgattctaaatagaaaatggaactgccttggtggaactccagaacctggatcatttgtccttatttgctagctcttggataaaagaaagaacaaaaatactaatttttcaggtaaaatacaaaaatcacattttaaaggcaaatatagttgtggtcatggctctggatgttttgcggccttgatctctcactcctaagatgcttatttatagttacagattctgccatcagattctatttcctcctgggtcctctcacataactgtagcaggtgaacaagatatgaaaaatctcaaagaaccacactcccgaatgggggctgtaagatgtgtatgttgatatctcacaatgcagaaaatgccttttgttagttttctgtacattctttatccaaactccggcccttatttgtaaatccgaagcagagcccagaccttatctgcagattctaggtaggatccacctggctctgcatcctttggtgttacagcaagtggagtacaatcaaagaagagatcccctcatagaggctgctctagcacattctaaatgataagtctacatgaaaaaaaaaaagctgacacaagatgaatgtaagtactgtcaggcctctgagcccaagcctagccatcgcatcccctgtgacttgcatgtatacgcccagatggcctgaagtaactgaagaataacaaaagaagtgaaaatgccctgccccaccttaactgatgacattccaccacaaaagaagtgaaaatggccggtccttgccttaagtgatgacattaccttgtgaaagtccttttcctggctcatcctggctcaaaaagctccgccactgagtaccttgtgacctccactcctgcccgccagagaaaaaaaccccctttgactgtaattttcctccacctaccgaaatcttataaaacagccccacccctatctcccttcgctgactctcttttcggactcagcccgcctgcacccaggtgattaaaagctgttattgctcacacaaaacctgtttggtggtctcttcacatggacgtgcatgaaaagtacacagtttatttgggtcaagtttatggattacaacctgagagcaaagattcaagttgtctgaaacctctactgtgatcagcagcagttacaggaagatttgtaaagacaacaagagaggaacagagagtgggctgatacaaagttgattgtcagaaattgttatttatttacagaaataacattgattattaattagatatatatcattatggtttagggtatgggatatagtgtccaatgtggcattattagtttaatttttacctacctgtgccaatagtgaacagtttcaagagatgaatatatagttcaaaggggggagaaatacataactacactttcttttaactctctctgagtttgaagttcgtagaaatgtgatttagcctctctagaagtgactgtagaggactgtaagtaccaactaggcagatacacaattctgtctgcatatttagggaacagcatgcactgtgctacacaactgtcagttgactagaatcctcagagagaaagtcccttttagagtacattctggttggcaccttctgtgtgtacatcatgtctggtaattctagacagtgtttggaaacattaattaaaagaaaaatattctccatccccagagaaactccacaataatagaacagaaagaaaatggttttattacacaattaaacttgaatgtgacatgcatcatcatcagtctgcttaacagatcgcaaaaacataaagatggtcaccataattagtccacaagtagaagaatttacagcaccatgtcatacatagttcatgctaaattcacctggagaatgatgaggccatttgtgtatgctaattgcttatattcaatgacaaataaacttttcccatcttcattgatgcaataacatcgataaagctggagatcattattcttagaaaactaatgcagagcctgggcacggtggtttatgcgtgtaattccggcactttgggaggccgaggtgggtggatcacctgaggtcaggggtttgagacaagcctggccaatatggtgaaaccccgtctctactaaaaatagaaaaattagccaggcatggtggtgcgtgcctgtagtgtcaactacttgggaggctgaggcaggagagtcgcttgaacccgggaggcagaggttgtagtgagccgagattgcaccactgcactccagcctgagtgacagagtgagattccatctcaaaaaaaaaaagaaaatttttttatttatttacagaaataacattgattattgattagatatatatcatatatcatatatatatcatatatcatatatatatccttatggtttacagtatgggatatagtgtccaatgtggcattattagtttaatttatactactcgtgccaatagtgaacagtttcaagagatgaatacatagttcaaaaggggagaaagacataactgtacttctattttaatgtctgtctgagcttgataacaaaaagacttccatttttcagacaaaagttttttatttcccaaatctcaagacctcaattcaaaatttggagctacagatttagagcctgaattgctggagttgcagcaggtgttacctgcacgtttgttgggattttagcatgaggaggaaggggaaagtggagattctcatgtctacatgtctactcaatgcacacatgttattctgattaagtttctgggctttatagtatctgaatcagtttcaggtctaaagacacaagagtcagtgaaagaggtaaaataattgattgctactctctgaaacttggagaaatgtggtctagcctctctagaagtgactgtagaggactatagataccaaatcagcagagacacaattctgcctgcatatttaggggatggcatgcactgtgctacacaactatgagatgactggaagcctgagagggaaactctcctctagagtaaattctggttgacaccttatgtgtttatatcatgtctggtaattctagacaatgtttgcaaacaatccttaaaagaaaaattgggctgggcatggtggctcactcctgtaccactgcactctagcctgggtgacagagtgagaccttctcaagaaaaaaaagaaaacagcaaaaaagaaaaattttatccagccccagagaaactccacaataatagaagagaaagaaaatggttttattacacaattaaacttgaatgtgacatgcatcatagtcaatctgcttaacagttcacaaagacagaaggatggtcaccataattggtccacaagtagaagaatttccagcaccatgtcatacagggttcatcctaaattcacctggagaatgaaaaggccacctgtgtatgctaattacttacattcaatgacaaataaatttttcacatcttcataacaggaggtagttttgcagcttgaagccaagtgcctgctgaaggtaggctttcactctgctacaaaaaagtttcagtaggattctatatttttggctatttacattttagagcagtggctctgtactcactggcacttggctacagcactcctgcttgctttctcctggttgctagtgtcctctattcacctctaccatctgccactgaggcacagccaacagcacagctcacattttatgtgaaccccatttgccacagcagcactctagtgtcacatgagcgagtgaggcctgagctgcaggaggagagcctgcaggcctcatgggtagaattacaccttcacaataatggaaatgggagtagtgtttcagcctcagtttccacttataatggtgacaaggaaaaaatactgctgaatttccagcctgagtccagatagagatagctccaaaagttctcactgtgacagcccaccccattcagacaccatgggatactaatactaacagggcttctgaaacagacaaagcattggagagaaaaacagatctccatctgagcgagattattttgagagaagaaagttaaaaagattttaagaaaaagctcagattagatatgagattgatcaagtcagtcagaaaatattcccttaaaagaaatttctgtctaaacacccaaaccgcacagctactctcagcatgagaaacatgagcaatatgaagaaaggtggcagaatttcagaagaattttataaagtttcttttcgatctctgctgctttctcatctcctagccattgaataggggttctatctcttttttaccctctctctttttgaatgtattcaacaacgtttactttggtaatagtgcattatcaatactaaagctaattttaataacactttataaataaataaaatttgtcaattttgaccactccagatttacatatatattttgtaatctcttgtaattttttgtctgtatttcatttttatccatattcttttttttaaactatatttgtaatgctttatttcttttttttttttttttaattgatcattcttgggtgtttctcgcagagggagatttggcagggtcataggacaatagtggagggaaggtcagcagataaacaagtgaacaaaggtctctggttttcctaggcagaggaccctgcggccttccgcagtgtttgtgtccctgggtacttgagattagggagtggtgatgactcttaaccagcatgttgccttcaagcatctgtttaacaaagcacatcttgcaccgcccttaatccatttaaccctgagtggacacagcacatgtttcagagagcacagggttgagggtaaggtcatagatcaacaggatcccaaggcagaagaatttttttttttttttttttttttttttttttgagacagcgtctggctctgtcgcccaggctggagtgcagtggcgcaatctcggctcactgcaagctccgcctcctgggttcacgccattctcctgcctcagcctctcaagtagctgggactacaggagcccgccaccgctcccggctaattttttgtatttttagtagagacggggtttcactgtgttacccaggatggtctcgatctcctgacctcatgatccacccgcctcggcctcccaaagtgctgggattacaggcgtgagccaccacgcccggccgaagaatttttcttagtacagaacaagatgaaaagtctcccatgtctacttctttctacacagacacagccaccatccgatttctcaatcttttccccacctttcccccttttctattccacaaaaccaaccttgtgatcatggcctgttctcaatgagctgttgggtacacctcccagacggggtggtggccgggcagaggggctcctcacttcccagtaggggcggccgggcagaggcgcccctcacctcccggacagggcggctggcctggtgggggctgacccccacctccctcccggatggggtggctgccgggcagagacgctcctcacttcccagacggggtggctgccgggcggaggggctcctcacttctcagacggggcggctgccaggcggagggtctcctcacttctcagacggggcggccgagcagaggcgctcctcgcatcccagatggggtggcggggcagaggcgctccccacatctcagatgatgggcggccgggcagagacgctcctcacttcctagatgggatgacggccgggcagagatgctcctcactttccagactgggcagccaggcagaggggctcctcacatgccagacgatgggcggccaggcagagacgctcctcacttcccagacggagtggcggccgggcagaggctgcaatctcggcactttgggaggccaaggcaggcggctgggaggtggaggttgtagccagccgagatcacgccactgcactccagcctgggcaccattgagcactgagtgaacgagactccgtctgcaatccagacacctcgggaggccgaggctggcggatcactcgcggtgaggagctggagaccagcccggccaacacagcgaaaccccgtctccaaaaaaaaaatacgaaaaccagtcaggcgtggtggcgagcgcctgcaatcgcaggcacttggcaggctgaggcaggagaatcaggcagggaggtgcagtgagccgagatggcagcagtacagtccagcttctgctcggcatcagagggagaccatggaaagagagggagagggagaccgtggggagagggaaagggagagggagagggagagccattctttttattttttcaatttgaaacaccctttaagtaatttcaaactgttataggagatagaaagaaatcatttttgggaggccgaggcaggtggatggatcacttgaggtcaggagttcaccaccagcctggacaacatggtgaaatcctgtctctgctaaaaacacacacacacacacacaaaatttagggagtgctggctcacgcctgtaatcccaacattttaggaggccgaggtgggcagatcacttgaggtcaggagttcaagaccagcctggccaacatggtgaaaccccatttctactaaaaatacaaaaaaattagctgggtgtggtggtgcatacctgtagtcccagctactatggaggctgaggcaggagaatcacttgaacccagaaggcagagtagtgtaactgcccaaggggttcaccttgccctttgcctagacagagccaattcatcaagacaggaaaatttgtggaggaaaagttaaatattaaatttgaactcaattgaaaatggacacaaccaatggtcaccaagtcctggaacaggttgtgtgagccccttgatgcattcatccagcactgttttggagatatctctatttcaatctattccttttttttttttttttttgagacggagtctcgctctgtcacccaggctggagtgcagtggcgggatctcggctcactgcaagctccgcctcccgggttcactccattctcctgcctcagcctcccaagtagctgggactacaggcgcccgccactacgcccggctaattttttgtatttttagtagagacggggtttcaccgttttagccgggatggtctcgatctcctgacctcgtgatccgcccgcctcggcctcccaaagtgctgggattacaggcgtgagccaccgcgcccggctcaatctattcctatatattagttgttgaaaaacaatagagaattgcaaaagcaagttgacttttttgtgttgcttgagcccaatcatgaacgactctcttgactgggccttatgccaaacaactcattaccaaagagctagggtcccagagtgtgcccaagcttcatgagacctctcctcatctgtgcatagatgagtgtctgattctggagcccagactgttgcttcccactctggtggtgaatcctccatagtctggcgagcataatatatatatctcttttcccttctcctctttccattgcaatttgcttattgtatcaatctgcttatttcattgatttgcttatctcatttgcttattatatctgcatttccatttatgtaggataaagcttgttgacctttaaaggtattgtgtgtgtgtcttttcttctccccttgcgcgtttcccacacagaacatttttggcatcacaaacaggatttgaaaaccaaactgccacttttttgccacaatgacagagctggaaactcgaggaattcccatatccaggaatgggaactcccccagttctcacctttggggactgaatggttaaggggaactggtctttgtgggaactgagaatctaaattagtgcaatttaaacctttgactgtgcgggaagtgctgcaggggattccagtgagcaaaggagatgctgagggatctcccggagtggatggtgtttgcttactgcttataagttaatgtatcaagataggggctggttgctacaagagaaaaggtaagctggaaaaaaaaatgctaatccgacttccagactgaccctggcccaaagccaggcctatgtcttgactgatcaggctcaaagatatcagcctattgatgaaaaaagcagctgtcccaatggtcttatcagggtaaaattgaagaactaatcagctggggcctggagcaggtaaaaacccagctcttatctcaaggataggaaattaaccttagtaaaattcaaggacaagcacaaactgtaaaattcctcggcattctatggaatgcagggaaatagtccattttaccaaaggccaaggctaaaatactagaatttgcaacccctaccactaaaaaggaggcccagaaatgtattggcttgtttggattctggagacatgatattcctcacttgggtaacattttacaacctctgcatgcagccactagaaaacgctatgactttctttggggagagaaagagagcatggcttctgaacaagctaaacaagtgggtcaactggccctgggtctatgacctgtacggggtgggccagtagaactgcaagtaactgtcctaaatcaacatgctaattggagccttaggcagaagcaagatgggaagagggtacctttcaggttttggaaccagaaactgccagaggatgacaaagcttatacccgtttcgagaagcaattgttagcttgctattgggttttgctggaaacgaaacacctctgcttcaaccatgatgtctttatgaggcctgaaattcctactatgacttgagtcatgggttcccccaaaactcaccagatagggcatgcccaagaaagtagcatcatagaatggaaatggtatgtacaagagcatgctaagccaaagccaaagcgtatcatttttacatgaggatgtgcaaaacttgccagctcgggagatcaccaaggaagtcctgcaggtagggaaggaaacctcccccacccaatggggcaactcctttaaagtgtaaagcccaatcttgtattaacacgaatagactttcccttagatacctaaccttgtttttaacatgaatagactctcccttagctgagagaaccggaagaactccatttggctccttcatttacaagacatcaagtgctccttacccagcccctttcctcaaggacttaacttgtgcaagctgactctcaatatatcaaagagtgcaattaactgataaggtgctgaggcaagcgaagtccgctggaatttgctcggagatggtgccataaagcccccgcattttgtccggtagataacacgcagagcccccgcacctatcactttgtgatgaaataaaagcccctgcacctggaactgtttgttttcctgtaaccatttatctttttaactttttttgtctgtttttcttctgtaagattgctgcagctagaattccccctcccctctgtaaacccaagtataaaagaaaatctagccccttcttcggggctgagagaatttcgtgcgtcagccatctctcggtcgccggctaataaaggactcttgaatttgtctcaaagtgtggcgatttctaactcgctcaggtacaacaaaagaactaagcctagaggatcagaaacatgcttgatttatgatggatccaccaaatacattggtgggacccgatgctggaaggctgtggcttataaccctgttaaaaaggtaagcacttctgatgaaagaaggggtgggagcagcaagttagctgaactagtagccatcctctgagctatacaggaggaagccagagggatttgtcacttttttcatgcgcgtccgtgtgaagagaccaccaaacagtctttgtgtgagcaataaaagcttttaatcacctgggtacaggcaggctgagtccaaaaagagagtcagcgaagggagataagggtggggacattttataggatttgggtagataaattacagtcaaaggggggttgttctctggtgggcagagtgggggtcacaaggtgctcagtaggggagcttttgagacagggtgagccaggagaaggaatttcacaagacaatgtcatcagttaaggcaggaatgggccattttcacttcttttgtggtggaatgtcatcagttaaggcaggaacaggccatctggatgtgtacaggtcacaggggatatgatggcttagcttgggctcagaggcctgacaacttgtataccaacactttatcagtagcaaatggtcttactacctggatgctccaatggtaatgaaacaaattgttaattgggaataaagaggtttggggaaaacaatactgggaagatgtctgaatcctggcacacactaccattattgctgtcttccatgttgatgcccatgcatctctgctttctcttgacagactatttaatcaccaggaaaatcaacaggccaaaatttttattataactgcaaacttgaatgcagatgaatggattacaacgtgtttcaagccttgcaatgacaggcattataatggatggtggtataatttatagcgattagtggcctaaatgtgccacttaaaagatacagaatggtagaatggataagaatttaccaaccaaatatctgctatcatcaagagactcggccgggcgcggtggctcacgcctgtaatcccagcactttgggaggccgaggcgggtggatcatgaggtcaggagatcgagaccatcctggctaacaaggtgaaaccccgtctctactaaaaatacaaaaaaaattagccgggcgcggtggcgggcgcctgtagtcccagctactcgggaggctgaggcaggagaatggcgtgaacccgggaagcggagcttgcagtgagccgagattgcgccactgcagtccgcagtcccgcctgggcgacagagcgagactccgtctcaaaaaaaaaaaaaaaaaaagagactcacccaacacataaagactcacataaacttaaggcaaagggttggaaaaagataatcatgcaaatgtaccttaagagcaagcagtagtcgccattcttacatcagacaaaacagatattgaaacaaaaacggttaaaagaaagacaaagagggacattatataatgataaagggacaggaaactatcacaattctaaatatatgtggacctaacactggagctcccaatttattaaacaattactactagacctaagaaatgagatcaatgtcaatacaatgataatggggaacttcaatactctactgacagcactagacaagtcatcaagacagaaagtcaacaacaacaacaaaaaaacaatagacttaagctatagcctagaacaaatggacttgaaaaatatttacagaacattctacccaacaactacagaatatacattttattcctcagaacatgaaacattctccaagatagacatatgataggccacaaaacaagtctcaatacatttaagacaatcaaaattatatcaactactctctcagacaacaatggaataaaagtgaaaatcaacttcaaatgcaccctcacaaccatgcaaatacacggaaattaaatgaaaaataaaatttaggatcaacctgtttctgaatttttttgtatgaaatcaagatggaaatttaaaaattaattgagctgaatgataataatgacacaatctatcaaaatgtctgggatacaccaaaagtggcgttaaaaggaaagttcatagcatcaagtgcctacatcaaaaagtctgaaagagcataagtagacaatctaaaataacacttcaaggaactagagaaacaagaacaagccaaacccaaacccagcataagaaaagaaataacaaatatcagagcagaaccctagggggaggggtggctgcagtctctgtggacaagcagacttagcctttcctcctgctagttctgagcatttccagcagctcagatgagtgtatttgcccccagcaaaacactcctcctccaccaaacgacagtcaaagtgcttcattaaaagggttcttctccccatgcactggatgagacccctcaacaggggttgtcaggcaccctatacaggagtgatcctactggcttcaggttggtgcctcttgaggtcagagatcccagaggaaggtgcagacactcttctttactgctctgcagcctccttgagtgacctctccaggcactggagtgaaccagatgaatagggcctgaggtgaacccctagcaaggtgcagcaaccctacagaagagggacctgaccactgaatgaaaaacaaacaaacagaaagcagcaacaacagcatcaacaagaaaaaaatatacccagaaaaatcccacccaaggctgcacatggtggctcacaccataatccaaatactttgggaggttgaggcgggcagagcacttgaggtcaagagtttgagaccagcctggccaacgtggtgaaacctggtctctactaaaaaaaatacaaaaattagccaggcgtggtggtgcacgcctgttgtcccagctacttgggagtctgagacatgagaatcacttgaaccttggaggcggaagttgcagggagccaagatcctgccactgcactccagcctgggtgacagagcaagactctgtctcaaacaaaacaaaacaaaacaaaaaaatccaagggtcagcagcctcaaagatcaaaactagacaaactcatgaagatgagaaagaatcaacaaaaaaacattgagaggctagagtgcctcttctccaaatgatcaaaatgtttcttcagcaagggtacagaactggacagaggatgagatgcaggaattgacagaagtaggcttcagaagatgggtaataaaaaaactctgctgagccaaaggaacatgttctaacccaatataaagaagctaagaaccttgataaaaggttagaggagccgggcgcggtggctcacgcctgtaatcccagcactccgggaggccgaggcgggcggatcacgaggtcaggagatggagaccatcctggctaacaaggtgaaaccccgtcactactaaaaaatacaaaaaaaattagccaggcatggtggcgggagcctgtagtcccagctactcgggaggcagaggcaggagaatggcgtgaacccgggaggcggagcttgcagtgagctgagatcacgccactgcactccagactgggcgaaagagcaagactccgtctcaaaaaaaaaaaaaaaaaaaaaggttagaggaactgctaactataataacaagtttggagaggaacataaatgatctgatggagctgaaaaacacagcacgagaacttcatgaagcatacaaaagtatcagtagccgaactgaccaagcagaagaaagaatatcagtatttgaagaccaccttgtcaaaataaggcatgcagacaagattaaagaaaaaagaataaaaaggaacaaagaaagcctctgacaaatatggtgttctgtgaaggaaacacatgagggtagaagaaaagacacctacacaatacctttaagggtaaacaagctttatcccacataaatggcaatgcagatataagtaaattttttttttttttttgagacggagtctcactctgtcacccaggctggagtgcagtggcgcgatctcggctcactgcaagctccacctcccgggttcacgccattctcctgcctcaacgttctgagtagctgggaccacaggcacgtgccaccatgcccggctgattttttgtatttttagtagagacggggtttcaccgtggtctcgatctcctgacctcctgatccgaccgcgttggcctcccaaagtgctgggattacaagcgtgagccaccgcgcccggccaagtaaattgatataagaaaattgcaatggaaaggggagaaggaaaaagatatatatatatacacacacacacacataaatatatatatatacacacatataaatatatatatacatacacacataaatatatgtacatatatatacactcaccagactatggaggattcatcgccacaccggaatgcaacaacctgggctccagagtcagccacccatccatgcaaggacaaggagaggtctctttaagctttagtgcgttctggggctctaggtcattttgtaacaagttgtttggcatgaggcacagtggagggcccttgagactgggctcaaggaacacaaaaagttaacttgtttttgcaattggctattgtttttcaataacaatataaaggaatagattgaaatcgagatttctctgaaacaactctagatgaatgcatcaaggggctcgcagaacctattctcaggcttggtgaccatcgtttgtgtccacattcaattcaattcaaatttaactttttctccacctttggcctcaattggatactcaattgtaggaaaatacccttacagatacatagggaaggcatagtcgatatagattacagatacagggtaaggacaggagaattaaaagcacaattaataaaaaccacacccagcatggctttctaaggagagtcatattgtgagaattgccagggatatacacaccacatttagcatgcaatatggcacaaatccctccttgggctgcggtaagcatatctaatgccatttgattttgcaacacaacagtactcagctgagcaaatttatctggtaacaacataagtctagtgctaatatcattaagagctttttctacatataaccttaatattttagtttgttgctgaagcaggattgtaccagtggcaggggagaatactgtgatagggtactgccaccagggaggccagggaggctggcacattcataaccagtgatgtttgtaagtatctaaattacttgggagaggaatattaacccggatggtgaatggaattaatggctatccccaagttcatctccctgtccagtgtggggacaggtatcaccactcataggatctgcatacccagagggctcccccaggggacagcaatggagctactgtaatcacagtgtactcatgtattattaaagtaggaaagagattgtggttcactgggggcaatgttgatttggagtatgtgttgacaattgtctggagaaaccccagagtaatattagaggaaccttttaaggcctccagactaagcgggggctatagggaatccaggcaccagcacagctggtttccaaaatataccattccaggaatattgggcaggataccaaggcttttgatgaaaggagaatgtggagttcaccttttgtctgacttgggcaaagatagattgcttagtgtggtcaaaggaagtacaggttggactacaagtgttgttgtgaccccgttggtaactacatagccattcagaaatgttgtcaggatgattctccaaggtagcccattcctggcggcctttggcaactcgacgtatagaaaacattgtctgtgattggcttctattgcagcggtggctacccagttcatgaatttattcttggcctcagacacaaagacacaggtgctgaccattagtagatagattattccctgtaataacaaaaaaggataggaacatcatattgtttttcatctttaggaaattgtactatgccttcattttctgttttcacagctacaaggtcaccagacttaggggtgggatctgatggatgctgtacccatatattggctccaggatttaagctacatgaaccagtggatctgaatccccgagttctgtatgtagcctctgttgggacagagatttcctcaggggttaattgttgacaaggtaccactaataattgagcaacccacatttgtggttttatagcaaaagaatctggagtggtattgtataaaacaacctttaactctccccagtaatcaccatcaattataccaccaaacactataatgcctctcattgcaaggcttgaacacattgtaatccattcatccacattcaaatttgcatttatggtggaaattttggcctgtcgatcttcctgctgattaaatagtctgtcaagaaaagcagagatgcatgagcatcatcatggaaaacagatccaggagtggtggcccaagcctgtacttctaccaatttgggaggctgaggtgggttgttcacgaggtcaggagattgagaccaccctggtgaacacagtgaaaccccgcctctactagagaagtacaaaaattagctgggcgtggcggtgcatgcctgtaatcccagctactcgggaggctgaggcaggagaatcacttgaacctgggaggcagaggttgcagtgagctgagactcagccactgcactcaagcctggtgacccgagactgagccactgtactccagcctggtgacagagctagactccgtgtcaaaaaaaataaattaattaatacaggaaaacaatgataatggtagtgtgtaccagaattcatgtatcttcccagtattgttttccccatacctctttattcccaattaaccatttgttttgttgtcattggggcatccaggtagtaagaccatttgctactgagcaagagttggtatacaagtgacaaatccttcttccttcctttcgaagagctcagaggatgtctactagttcagttaactggctgctcccacccctttcttcatcagaaatggttatgtttttcggttgtttgtttttgagatggagtctcagtctgtcacataggctggagtgcagtggtgagacctcagctcattgcaacctctgcctcctgggattccagtgattctcctgcctcagccccctgagtagctgggattatagatgcatgccaccacacctggctagtttttgtatttttagtagagatggggtttcatcatgttggccagcctggtctcaaacttctgacctcgtgatccacacatcttggcctcctgtggattttgagggaactcgtgacctaaatcataacaggaaatttaggcctcataaagacatcatggttaaagcagaggtgttttgtttccagtaaagtccaatagcaagctaacaattgtgcacaggtgaggagagctgtcacgaagctttggcgcagtctgggaccctagctcttttgtaatgagttgtttggcacgaggcttagtcatgaggacccttcgcgactgagctgaagaaacacaaaaaggtcacttgtttttgggattgtctgttgtttttcaagaacgaatgtataggaatagattgaaatacagatttctctgaaacagcgctggatgaacgcctctaggggctcacacaacctgttcccggacttggtgaccattgtttgtgtccacgttcaattagcacaaatttattatttaactttgactccacaccagactatggaggattcaccaccagaccggaaagcaacaggatgggctccagagttggccacccatcggtgcacagaccaggagaggtataatgacgcttctgcgcggtctgggaacctagctctttttgtaacgagttgttcagcatgaggcctagtcaccagggcccttcatgactggtctcaaggaacacagaaaggtcaacttgtttttgtgattgtctattgtttttctttttctttctttcttttttttttttttttttgagacggagtctcgctctgtcgcccaggctggagtgcagtggcgcgatctcggctcactccaagttccgcctcccaggttcacaccattctcctgcctcagcttcccgactagctgggactacaggcgcctgccaccaggcctggctaattttttgtatttctagtagagacggggtttcagcgtgttagccagcatggtcttgatctcctgacctcgtgacccgcccgcctcagcctcccaaagtgctgagattacaggcgtgagccaccgcgcccggccttgtctattgtttttcaataacgaatgtataggaatagattgaatagattgacatagagatttctctaaaatagcactggatgaacgcctcaaggggctcacacaacctcttccaggacttggtgaccattgtttgtgtccacgttcaattgagttcaaattaaatatttaacttttcctccacaaattcccctgtcttgatgaattggttttgtctgggcaaagggcaaggtaaactccttgggcggttacacaacctccacctcctaggttcaagagattctcctgcctcagccttcggtgtagctgggactacaggtgtgcaccagcacgcccaggtaaggttttgtatttttagtagaaatggggtttcaccgtgttggccagggtggtcttgaactcctgacctcaagtgattcgccctctttggcttcccaaagtgctggaattacaggcgtgagccaccgcgcctggccctaaatgatttcctttctgtctcctataacagtttgaaattacttaaaagttgtttcaaattgaaaaaataaaaagaatgtagataaaaataaaatataaaaagttaaaaaaattacattagattacaaaatatatatgatgtatatgtaagtctcgagaggtcaaaaatgacaaatttgatttacttacaaggttttattaaaattagctttcgtattgataatacactattaccaaagtaaaagttttctcttgaacaaaaattttttgtattattaatatgacagccaaatacttctgttcaccttttgaatacattcaaaaagagaaagagtaaaaaagaattttcccatgctctccggtgggcctggctcagctcaaggaggaagcccggcctgaaaaggctgcagctgaggctgtgactctttcttcactcagcccagcatgtgatcacatcttctgtcactcagggactgaggaggcggggccttaagcattatccaatcagggacgctgggttggaaaccgtccaatcatgcaggcagctggagcgaagaggaaggctttcgggtttggcgcggccatttgtctcttgctgcagctggtgctccaaatctggtcttagctgcttcgtgtcttcttctccagcctctgtggccctgtgacctgcaggtattgggagatccacagctgagggacccccggaagcctagaaatggtgagagtgcctttccagcattccgagagaggggagggactggttggaaccgatgggaagtggctgtggcgggacttaggcctccccgcagtcagctccacaatctgcgaccgacttctccttgcccagttcggcctcagtccccttcagccataagatggcaacagcgccgacagccgggccccgcggcgtcctgtctcttccctgccctggcctggagccctctctgggcagctctgcacccacagcgctgcgtctctcccagattgtgcagggagcacgggagggttctcgggggagaatcctgactcggggtgcaggttcatgaatgggaagagctttggtccatggggttgacagtttctcttttctcctattaaaaacttatggggccggtcgctgtggttcatgcctgtaatcccagcattttgggaggtcgaggcgagcggatcacttgaggtaaagggttgttagtacaacgtagttcttcttcaaagacgcaacttcctggtcataagttggaaaagttgtaaatcacccctaccccttcttctcccttctccttttctcacaaatcgcgcattacccgatttggaaaaagcttgagtgtaagccaaccgggatcagcttagattgtgcggtctgaccccagccaatggagggaaaacaaaaacagaactgcattagggctaataaccccttcccggccaggcgcggtggctcctgcctgtaatttcagcactttggggcgccgaggcgggcggatcacgtggtcaaatttctagaccagcctatccaacgtggtgaaacctctctctactaaaaatacaaaaattagcctggagtggtgccaagcgcctgtaatcccagcaacttgggaggctgaggcccgagaattgcttgaactcgggaggcagaggttgcagtgagctgagatccctccatcgcgctccagcatgcgcgacagagggagagtcctcaaaaaaaaaaaaaaaaaaaaaagtaagcatcttaaaatttccatcctttatgtaaacactgtgttttagtaacttcactgtattttccaacacttagtttcaaaaacccagtgaataactctggcatggaaattaaagcttgaacctagtgattccgagctaaggctaatattaagcctgcaaaaggagggttttttttttttttttgagatggagtttgtccaggcagatgcagttaagattaagatgaaaggaaactggatgggtcttactgataatgatgttattgttttgaggcacttgtttgactttgtaaaataaaaacgttagatttatggaaaaaaatgaattccaaaaacatattgcaacaggaggaagtaccaacaaagtataacgtctttatggcttgcaaaaacgtaggcagaaaagtgctttcttccctagggaggagcaaagaagtttagaaaggaggtgggaggggaatggcaaatggagggtgcaaaagtcagattttatatcagagaatgtcttactctgaaatcagcatgttcttaggagggatgtaaaatgtggttgtatgttgactcagactgagggtagctcaaagttcaggagcttgagggaggcatataagcttaagaaaagtttcattgagaaatattttgttttaggccaggcgcggtggctcacgcctgtaatctcatctgctcggccaccctgtcccggccctgaagcgatgtaagcaagaagctgccctgctggaactgctccttcgggagactgctgattttggcattctttttcctttcatcgtatttcctctttttttttttttttgagatgaagtttctctcttattgcccaggctggagtgcaatggcacaatctcggctcactgcaacctccgcctcctgggttcaagcgattctcctgcctcagcctcccgagtagctgggattacaggcatgcaccaccacacctggctaattttgtatttttagtagagacagagtttctccatgttgaggctgcaagaattgcaggtcagcaagaattgctgcccaggggcagcacataatgggactagtaccaccgtcctgacggtgtgctgttgatgagcacgatgcaattcttcaccagggtcttggtacggactagctcgttattagatgtattgtagacaacatggacgatccttgttttaccagtacaacactctgagccacaggagaaattcccccgtccagcctcagggcaccgtatttcttcttacctccccacaaacggactgtgtggatgcggcgggggccaatcttggtgttggcagccgggcgccacaactcatccttctgcttcttgtggtagggctttctcttgcccctggacttgcagcgtttgtgccagttgtcccaagagatgcccatctctcagcgctggctggaaagagttctcttttctttgatctatgcatttcttccatttggcttttcctgggccacatcttatacattaaaccggtaaacatcactacagtgttttcctgagttctgtgaatagctctagcaaattatttgggtgtccccaattttcaaacaataggtgagaagcatagatgggccatggggtttgtgactggcatctgcagtgaggacaatgttgtgggactgagcactgaaacggggtctgtgctgactctgggtggtgtcagatttcaaatgttagataatgagttgttgttggagagttgtttgacgttcagcaaactctgcagatttggtgccagcaaaagatatcacggaggcctggcctggaataaaactctgggtgtttgggaataggaggctctcctgtacacaggctgtcacactgcccattgtcctgtgattccagatcttctcccagggtgacagaggactgaaaacttagaggaaaagagctctgatgacagacaccccccttttcttgcaagtgccacaataggattcccacctactcacaaacacacacactagacatagacgtgcccatactcctcccaggactaggcaccaccttcaggaacttcattatgccatttttttttctttttctgagacagagtcttgctcttttgcccaggctggagtgcagtggtgccatctcggctcacttcaacctctgcctcccaggttccaacgattcttctgcctcagcctcccaagtggctgggattacaagtgagtgccaccacacccagctaatttttgtatttttagtagagacttggtttcaccatgttggccacgctggtctcaaaatcctgacctcatgatccacccaccttgccctcccaaagtgccgggattacaggcataagccatcgcacccagccagcatttttgatcctagtgtttcttgccaagaacccacaagtgtctacaagtctcctggcatatccccacccccagacactgaatctgcagcagcaacctattttctccatcaacctaaaggtctggacctcctctttataatctcatctgcctgcatgcatacagaaataaatcagagtgtggccccacctgggccactatctgtagcgaaaatcagtctgttcatctacattgcagtctttcccacacagggatttgttttttttctttctttctttcttctttttttttttttgagatggcgtctcgctctgtcatccaggctggagtgcagtggcgagatctcggctcactgcaaggtctgcctcccaggttcacactattctcctgcctcagcctgctgagcagctgggactacaggcacgtgccactacccccggctaattttttgtatttttagtagagacggggtttcaccatgttagccaggagggtctcgatctcctgacctcgtgatccacccgcctcggcctcctaaagtgctgggattacaggcgtgagccaccgcgcctggcctgtttttttttcttgtagcttttatttttggtttagggtacacatatgggtttgttatacagctaaaattatgtcatgggggtttggtgtgcagattttatcactgagatactacgtatagcaccaaacatgtctgttttctgatcctcatggtcctcccactctccaccctctactaggtctcagtgtctgttattctcctgttgtgttcatgtgttcttattatttagctcttacttataaataataacatgcatttggttttctgtttctgcatttgtggggaaaagagagatcagactgttactgtgtctatgtagaaagaagtagacataagagactccattttgttctgtactaagaaaaattcttctgccttgagatactgttaatctgtaaccctacccgctaccctgtgcttgcaggaacatgtgctgtgtccactcaaggtttaatggatttagggctatgcaggatgtgctttgttaaacaaatgcttgaaggcagcatgcttgttaaaagtcatcaccactccctaatctcaagtgcccagggacacaaaacactgtggaaggccgcagggacctctgcctaggaaagccaggtattgtgcaaggtttttccccatgtgatagtctgaaatatgacctcatggcaagggaaagacctgaccatcccccagcccgacacccataaagggtctgtgctgaggaggattagtaaaagagaaagtcctctttgcagttgagataagaggaaggcatctgtctcctgctcctccctgggcaatggaatgtctcagtgtaaaacctgattgtatattccatctactgagataggagaaaacccccttaacgctggaggtgagacgtgctggtggcaatactgctctttaatgcaccagatatgtttatgtatgtgcacatcaaaacacagcacattttctaaccttgtttctgacactgagacatttcttcacgttttcctgctgacccttcccccgctattaccctattgtcctgccacatctccctctctgagatggtagtgataatgatcagtaaataactagggaactcagagactggtgccggtgccggtcctccatctgctgagctcttgtcccctgggcccacttttctttctctatactttgtctctgtgtctctttcttttctcagtctctagtcccacccgatgagaaatactcacaggtgtggaggggcaggccacccctttagcattagttttcttttttttttgttttttgttttgttttttgagatgaagttttgctcttgttgcccaggctgcagtgtaatgttgcgatctcggctcattgcaacctttgactcctgggttctagcgattctcctgcctcagcctcccaagtagctagtattataggcgtgcaccaccacgtttggctaattttgtgtttttagtagcaacagggtttctccatgttggtcaggatggtcttaagctcccgacctcaggtgattatcccacttcagcctcccaaagtgctgggattacaggcctgagccaccacgcccaggctctgcattagttttctaagaataatgatctccagcatcatcgatgttattgcaaaggacataatcatttcttttaatggccacagagtattcatgatgtttatgtatcatattttgtttttactaaatcttttatttttggagacagggtcttacttattgttcaggctagagtgctgtggcatgatactgacatacattagcctgaacctttcaggctcaagcaattctctcctacctcatcctcacaagtagctgggactacacatttgcgttaccacccctggccaatttttctttttgtattttttgtggagacaggattttgccatgttgcttaggctggtcccaaacttctaaactcaggcaatccaactgccttggcctcccaaaatgctgggaggacgggcatgagccaccacatttgaccataccatattttctttttttttttttgagacggagtctcccaggctggagtgcagtggtgcgatcttggctcactgcaaactccacctcccaggttcaagcaattctcctgcctcagccttctgtgtagctgggactacaggtgctggccaccacgcatggcaaattttttttgtatttttagtagagacggggtttcaccatattggtcaggctggtctcgaactcctgacctctggtgatccgcccgggtcagcctcccaaagtgctgggattacaggcatgagccactgcgccaggctgaccataccatattttctttatccagtctaccattgataggcatttacagcctgtccatgtctttgctattgtgaatagtgctgcaatgaacatgcatgtgggtatgtctttatgatataataatttatatttctttggctatatacccagttgtggggctcctgggtcaaatgaggattctgtttttagttctgtgaggaatcgccacactgctttttacagtttttgaactaatttacactcccaccagaagagtataagcattcccttttctctgcaaccttgccagcatctgttattttttgactttttaaaaatagccattctgactggtgtgtggtggtgtctcattgtgatttttcttttaatttctctaatgattagcgatgaccactttttttcatatgctagttagcttcatatatgtcttcttttgaaaagcatctgttcatatattttgcctaatttttaatgaggttgttcggttttttcttgtaagcttgtaggttgtctgtttactctgttgatagtttcctttctgttaggaagctcttaagttcaaatgggtcccattggtcaatttttgcttttgttgcagtagcttttggtagcttcctcatgaagtctttcccagtttttatgtctagaatggtatttcctaggttatcatggctgggtttcttataattttaagtttttcatttaattttttaatttatcttcagttgatttttgtaaatcaaaatgaaatgaaagggtccagtttctgtcttctacatagtgttaggtatttattccagcaccatttatgaaacaattcttcccacattcctcttgacagctttgtcagaaatctgatggcggtaggagggtggcattatttctggcctctctgttctgttgcattggtcttttttttttagacggagtctcgctctttggccgagactggagtgcagtggcccgatctcggctcactgcaagctccgcctcccgggttcatgccattctcctgcctcagcctcccgaatagctgggactacaggtgcctgccaccgcgcccggctaatttttttgtatttttagtagagatggggtttcaccgggctagccaggatggtctcgatctcctgacctcgtgatctgcccgcctcggcctcccaaagtgctgggattacaggcttgagccaccgcgcccggccagttgcattggtcttatgcattaataagtttcatataatatctttctctcttttggtttttccctcataaaccttctttcaagtgcatacattgtacaaatttcagatgtccaagagttcaaaactctttgaaaacttccaaaaatgtttttgctattccctctttttgtaaggaatttagattatatgtagatatttttctttgttttattgaaatatatgtaaatcatattaacagctaaataaaccttttgtcattttttctgactccagattatctttatctagtacttcagatttattactttgtttttgcttccaaaatgtttatttttttcatttttagtcctttagacagatttgtttagataaaagctcattttaatagcatacagaagcttagcacaaagagaattaaatttagcaatacagaatgataaagactaaaagatactaaatttctttgtcagaaacctgatgatccaaggtaattatccaatatttgcaggctgaagcacttgtactgcaaaagcaagaacagttcagtgcataaactgaacagtgcagtctgtagttgtaccttgctttctattacttcataacaattagtatagttatgtgtaatgtttgcagactacctgcattcatataaattaaacagtattttcttttcttttttttttttttttttttttgagacagagtctcactcttgcccaggctggagttcagtggcgtaatttcagctcactgcaaccgctgcctcccgggttgaagtgattctcctgcctcagcctccagaatagctgggattacaggtgtgcccaaccatgcctgtctaaattattgtatttatagtagggatggtgtgttatcatgttcaccagcttaatcttgaatccttgacctcaggtgatccacccgcctcagcctcctaaagtgctgggattacaggggtgagccataaacagtattttctacaatagtatgagtacaaagctgcactacttactttgaattaatcacttaaatggttattttaatatcattatttacacttctgaaatataaaatgttttaactgaagtatagttttaatttttaaaactataattttaaactatacacatactatatacatactatatacattatgactagttcattaaaatgatttatacttacttaagtctaatatccaaataaaatttataccaaattgttacattaagtagatattagtgtgacatgtttattactttattcaatagggattattatgagtaaacacaattttaatatcttttatttcactaaattggtatgctgctattacaggacaaataaagacaggtgatgtggccacccaaaaactataatggttcttcagtttgctatgttgcaagctctaatatgttccactatatgaacacagtcagattctatttcttcatcaaaaagtgttgcttgaagttgtcagatgtatttcaatatagaacctccattcaatggctaggagatgagggaacagcagagatggaaaagaaactttataaaattattcttaagatctgcctccttcataatgctcatttctcatgctgagagtagcttgcactttgggtgtttagagagagatttcttttaggggaatattttctgactgacatgatcaatcttatatctaatctgagctttttcttagattattttaacttttttctcaaaataatcttgctcagatggagataatgtttttctctccaatgctttgggtgtctgtttcagaagatctatttgtatcacatggtttctgaataagctgggctgtcacagtgagagcttttggagctatctctatctggactcatgctggaaattcagcagtattttttccttgtcaccattataagtagaaaggagttgaaacactgctcccatttccattactgtgaaggtgaaattttacccaggaggcctgcaggctctcctcctgcagctcaggcttcactctctgatgtgacactggagtgctgctgtggcaaattgggttcacacaaaaggtgagctgtgctctgggctgtgcctcagtggcagatggtagaggtaaatagaggacactagctttcgtgcgtgtctatgtgaagagaccaccaaacaggctttgtgtgagcaataaagcttttgatcacctgggtgcagttgggctgagtccgaaaagagagtcagcaaagggagataagtgtggggccattttataggatttcggtaggtaaaggaaaattaaagtcaaagggggtttgttctctggtggacaggaatgggggtcgcaaggtgctcagtgggggtgctttttgagccaggatgagccaggaaaaggactttcacaaagtgatgtcaacagttaaggcaaggaccggccatttacacttcctttgtggtggaatgtcatcagttaaggtggggcagggcatattcacttcttttgtgattcttcagttacttcagaccatctgggcatatacgtgcaggtcacaggggatgcgatggcttggcttgggctcagaggcctgacattcctgccttcttatattaataagaaaaataaaacaaaatagtgttgaagtgttggggcggcaaaaatttttggggggtggtatggagagagaatgggcgatgtttctcagggctgcttcaagcgggattgggggggcgtgggaacctagagtgggagagattaagctgaagggaggtcttgtggtaaggggtgatattgtggggatgttagaagaaacatttgtcgtatagaaagattggtgatggcctggatacggttttggatcaattgagaaactaaacagaagatacaaggttcaaataaaggaaggagaaaaatgggtattaaaggactaagaattgggaggacccaagacatccaattagagagtgcccaagggggttcagcgtaattacttgcttggttggcaagtttttgggctctatccttgagtttttttatgttgtcatacaccaggccagattgatttaggtaaaaacaacactcttcatttaagaatatgcagggtcctcctttttcagcagtgagtaagtcaaggcctcggcagttttggaggacaactgcagctaaagagtcaacttgggcctggaggactgataaagtttgtgatatgtctgtgatgctagcagagaagtcattacacaggctacagaaggtcgtgacagaggttgaaatgcctgctattccagtaccaagagcaatagtggaggcagaaagtcctaaacggaccatcaagggaattagtggaagaactcttttttgtcatgttggtgtcatgaggggaacagggagctcttcggtcctatttgcaaattgaattttgggggtaaggaagactagtgtacatgtgcctgtccaattagcaggtagacacatgtaggtagaggatccacagaggaagaagagaccttgtgtgaggcaaaactggagatgtaaagtaaaaagatgagaaggagtgctgaaaggggtgtcttgtacccagactcctagggatccagctagggcggcagctgtcagaggttgtaatggggactgatggggtaactgcatagagggggagttttgattttcatggtgtatgagaaaacattgagtatctatgagcaacctttcactgttattttcggggctgggtataagtaaacgagaagagggcctgggaggagagtctgacgagcaaggggaaggtagccaaggatggagtgaaatacagggcaagtgtcttcctaagcaataattgctgcgaatttttttaagtttgcctgtattgatagagggcttgtctgtaatatgcagctggaaggctccagttgtttcagtgatgtgtgtagttgggcttcggagatgaagagtaaaggaacatcgagaaggtaaaagattacctaggggaattccagtgggtctttgcggagagatacataaaggagtggccactggaatagtaatttgtgttgtgagaggtccaaataggggggaagtagagttaatataaggagaaaggttttttaaataagtgcgaaggagggcggcagcttgctgatgtgaaatgtctggggaagtcttgctggacctgtccagaaagtaaatgagttcttcaggagggtaaagttgagggctgttaaaggaagttcggaggtgtagggagacggggggtgttgcccagtctgtctgtaaggtggggacagctgtgtaggcactggaagaaagggaaatgcaaaggcagcagttgttcgccaaggagggattagaagcggctaggagagaatgggtaaggttgatactgtggtggagatagctggggagaggtagagggtgacataagaatgggaatgagaataagagtgagcataaaagtaaagagtagaacttcatcagggttggaagtattggagggtgccctgccagcaaagatcatctatccactctaagagggagttaagagtggtggtttggggatagcaccaagagatatcagctgtaatggcttgaagaaacagtgtaaactggcagtgtaaacaagagtagggcatttataagtagttgagaatggagaataggagtatgaccggacagaagatagtagggatgactagtttttggggctcggcctaagtggtgggggtgacttcgtaaagccctgttgcaaaaagtagggtaaggacgaacagacctaatagaatgaagggatgtattaggctcataagggttattactgttcttcagaaatacgagtgagtttaagggaagtgggggagagtacttaagtgggggagagtacttgtgacttctaggaggaagaggagggattaggctggctgtccgatggacacagctttattctggaatggtgaacccagtggggaggatcctgcaggcggacggcagtcggggactatagatgactaagtagggtcccgtccatcgaggttgtagagtttgaggggtcagattcttaacaacaactgatcgtccagctaggttgtcttcatatggctggcgatctggagtaggtaagagaagattagaagcctggtgaatttcctgtctagcctgctggaggactggaagatagtcacctagagggctggtgtctgggatgaggctggggccaagcaagaaagtgcgtccatataaaagttcaaatggactgtaccctgtagcatctcgaggacaggctctgattctgagaagagcaagaggtaaaagtactgtccaatcttttttaagttggaggctgagcttggtgaggtgtggctttaaaagaccattagtccgttctacctttcctgaagattgaggatggtaagggatatgaagtttccactgaataccaagagcctgagaaactgcttgggtgatttggctagtaaaggctggtccgttatcagactgtatagaggtgggaaggccaaaccgaggaattatgtctgacagaagggaagaaatgaccgcggtggcctttcagaccctgtggggaaggcctctacccatccagtgaaagtgtctacccagactaagatattttagttttctgactcgaggcatgtgagtaaagtcaatttgccagtcctgggcaggggcaaatccccgagcttgatgtgtagggaagggagggggcctgaacaatccctgaggggtagtagaatagcagatggaacactgagaagtgatctccttgaggatagatttccatgatggaaaggaaatgagaggttctaagagacggtctagcggcttgtaacctacatggaagaggttatgaaatgatgacagaatagaatgggcctgtgaggctggaagaagatattttccttggtctaagaaccatttgccttgtgtgggaagagattgataggtggaagtttccgtgggggagtaggtgggagtgactgaagcgaaggagaaaaactggctgtgagggacagaagttggagagctagctgcttgtctagccactttatcagcataagcattgcctagagcaatgggatctgatgccttttgatgccccttgcagtgaatgaccccagcttcttttggaagtaaagtggtcttgagcagagtttttattaaagaggcattaatgatggaggacccttgtgtagtgaggaaacctctttcagcccatatgactgcatggtgctgcagaatatgaaaggcatatttagaatcagtatagatattgatgcgtagtccttttgcaagagtgagggcttgagttaaggtaactagttcggcttgctgagaggtagtggagggaggcagagcggtagcctcaatgatagatgtggaagatactatagcatagcctgcctttgctggtgagtggtgattaggcctggtggaactgccatcaataaaccaagtgtgatcagggtgagaaacagggaagaaggaaatttggggaaatgtgaatgtcaggtggatcagagagatgcagtcatgagggtcaggtgtggtatccggaataatgtgggaggccgcatttaagtccaggccaggaacaatggtaattgtgggagactcaacaaagagtgagtatagcagaaggagccggggagcagaaagtatatgtgtcaggtgtgaggaagaaaatagattttggaaattatgagagctgtagagagtgagttgagcatagtttgtgattttgagggcctctacaagtattagggcagcagcagcggctgcacggagacatgatggccagcctaaaacagtaaggtcaagttgtttggacaaaaaggctacaggatgcgatcctggtccttgtgtaagaattcagactgcacagccctgcacttcggctgtgtgtaatgaaaagggttgggatgagtcagggagagctagaataggggcagtctctaaagctgtcttcaaggaatggaaagaggagtggggaaaggatttaggatctatggggtcagctaggtttccttttgtgagtttatataattgttttgttaggttggcaaaaccaggtatccaaaggtgaaagtatccaaccatgccgaggaaggaaaggagttgttgttttgtagaagggattggggtttgagagattagtcggatacgatcggcagggagagcatgtgtgttcttatgaagaattatgccgaggtaggtaacggatggagaagaaatttgagctttggagggggatacccgatatcctttggagaataaacactgaaggagcagaagtgtgtcttgttgagaagattcaaaggaggggctacaaagaagaaggtcatcaatatattgaataaggtgagaagcggaggggtggaaggaaagtagatcatgagaaagagcttggctgaagtaatgagggctgtccctgaaaccctgcggcagcacagcccaggtaagctgctgggactgatgggtgtcagggtcagtccaggtgaaagcaaagagaggctgggacgaggggtgcaggggaatagtgaaaaaagcatctttaagatcaagcatggaatagtgagttgtggaggaaggtattgaggacaaaagagtgtacgggttgggcaccacagggtggataggcaaaacaatttggttgataagacgcagatcctgaactaatctgtaagacttatccggtttttggacaggtaaaatgggggaattgtaaggagagtttataggttttagaagcccatgctgtagcaggtgagtgataacaggctttaatcattttaaagcatgctgtgggatggaatattggtgttgagcagggtaagggtgattaggttttaatgggatggtaatgggcatgtgatcggttgccagggaaggagtagagatgtcccatacttgtgggctaaggtggggggatatgagaggaagatgcgaaggaggcttttggttggggagaagggcggcaatgagatgtggctgtagtccaggaacagtcagggaagcagataatttggttaaaatatcttggcctaataagggaactgggcaggtggggataactaaaaaagagtgcataaaagagtgttgtccaagttggcaccagagtgggggagttttcaggggttttgaagcttggccgtcaatactcacaacagttatgggggcaaggaaaacaggcccttgaaaagaaggcaatgtggagtgggtagcccccgtatcgattaaacaggggatggacttaccctccactgtgagagttacccaaagctcggcgtccatgatggtccagggggcttccgaggcgatcgggcaatgtcaatcttcagttgctaagccaagcagatctgggaaggagtcagtcagagagccttgggctagagctttaggggttctaggagtggctgccgggtgagctgggcagtctgatttgcagtgagtccctgcacagatgggacatggcttgggaggaatcccgggctgcgggcattccttggcccagtggccagatttctggcacttgaagcaagatcctgatggaggaagtcttgtaggaatgcttgactgctgtggcttaggcattctgaagttctcctatgcaggaggtgtggctgggttttgtctcacagtaggggcaagtaactgtaactcagaaatgcattgccgtctggctgcttcctccctattattgtgcaccttgaaggtgaggttgattaattcctgttgtggggtttgagggccagattctaatttttgaagtttttttgtaatgtcaggagctgactgggtgataaaatgcatattgagaataaggcggccttctggcccctctgggtctagggcggtaaagcgtctaagggttgctgctaagcgggccacgacctgggctgggttttcatcttcaccttgggtagtttctttaagtttgtcataattaacagctttgtaagctgcttttttaagcccttcaactaggcaggaaaccatgtaatctcgcctagctatacctggggaatttgcctgatggttccattggggatcctctcggggaactgctctaatgccttcctggaggtctggctcgtgaagccggcggttatcagcatgagattgggctagagaagaaactctttcccattcatctggggagagggtagaagtcaggatgacatttaagtcactccaggttaagttgtaggacagagttagacattggaattcctgtgtatatttagtggggtctgatgagaaagagcctaaacattgactgatctgagaaaggtctgatagagaaaaaggtacatgtaccctgactatgccttcagctccagccacctctctaagaggaaattgttgggcaggtggggaagagctagtcgcggaactaaactgtaagccggaccgggtgtgaggaggggaggtgatagaaggattatagggtggaggagtggaggctgaggaagaattgggacttagctcggcctggcaatgagcagcctggggaggaggggaaaggtcagatgggtctgtagaaaaggaagactggaaagactcagcgatgcttggggttgggactgaggggacaggcgggagggaaagaaggaggatctgggaggaatcgcattgggaacagaggctagggagggaacgaagtgtgaaaaatgcctggacgtaaggcacctcagaccatttgcccatttttcgacaaaaattatttaggtcttgtaggatgaagaaatcgaaagtgccgttttctggccatttagagccactgtcgatttgtattggggccaagcagtgttgcagaagaaaataaggcatttaggttttaggtcaggtgtgagttgaagaggttttaagttcttgaggacacaggctaaaggagaaggaggaatggagggtggaaggttgcccatagtaaaggaggcaaaccaagagaaaagagagcatagagacacggagggaaggggttcggaggttcttaccctccagaaaagcaggaaggggggtcagggcatggaaataagggattggggcacagagataagaggttgggctgcagaaataagggattggggcacagataagaggttggggtgcagaaataagggattggggcacagagataagagataagagattggggcacagaaataagggattgggggttcttgccccctagaaaagtgggacttgccgctaagggtgaaggagaaggggttgaggggttcttgcccctgccccagaaaagcagagaaggggtagagacaaggagagaaggggttgaggggtacttgtcccttccccagaaaagcgggacttgccgctaagggtgaaggaccaaggcaggtgtccctgtgtggtctgacacccttgaaacgtgagtgtataatcagagaggcatccctgcaatgattaaacaccaagggaaggctgccttcccagtccgtgaccggtgccggagttttgggtccatggataaaacgtgtctcctttgtctctaccagaaaatgaaaggaattgaaattaagagaagggagagattgaagtgtggcgccaagattggaaggagaaagaggttgagggatagtgagggaggttggagaagagagtaaaaagaggccgcttaccggatttgaaattggtgagatgtttcttgggctggtcggtctgaggacctgaggtcataggtgaatctttctcatggagcaaagaacagaggacaggggattgatctcccaagggaggtcccctgatccgaatcatggcaccaaatttcatgcatgtccgtgtgaagagaccaccaaacaggctttgtgtgagcaataaagcttttaatcacctgagtgcaggtgggctgattccgaaaagagagtcagcgaagggagataagggtggggccattttataggatttgggtaggtaaaggaaaattacagtcaaagggggtttgttctctggtgggcaggagtgggggtcgcaaggtgctcagtgggggtgctttttgagccaggatgagccaggaaaaggactttcacaaggtaatgtcatcagttaaggcaaggactggccatttacacttctgtggtggaatgtcatcagttaaggtggggcagggcatattcacttcttttgtgattcttcagttacttcagaccatctgggcatatacgtgcaggtcacaggggatgcgatggcttggcttgggctcagaggcctgacactagcaaccaggagaaagcaagcaggagtgctgtagccccctgccagagtgtacagagccactgctctaagtagccaaaatgatagaaccctatttaaccttttttgtagcagagtgaaaccctaccttcagcaggcacttggcttcaagcagctaaaccacctcctgttatgaagatgggaaatgtttatttgtcattgaatatgagcaattagcatacacacatggcctcgtcaatctccaggtgaatttaggatgaactatatatgacgtggtgctggaaattcttctacttgtggactaattatggtgaccatctttctatctttgcagtcacttaagcagattgactatgatgcatgtcacacttaattgtgtaataaaacagttttctttctgtactattattgtggcatttctctggggctggagacatgttttctttattgtttccaaatactgtctagaattaccagacatgatataaacacataaggtgccaatgagaatttactctagaggggacttttcctctcaggcttccagttgactgacacttgtgcagcacagtgcacgctgtcccctaaagatgcaggcagaattgtgtctcagcctatttattaatctatagtcatctacagtcacttctagagaggctagatcagatttctataaatttcacagggcagcaatcagttattttacctctttgactcttgtattttcagacctgaaacggattcagagaccatggggcccacaaacccaattagagtaacgtgtgcattgagtagacatgtagataagagattctccactttcttctttctactctgctaaaatgctcacaaatgtgctataaacatgctgccactccatccattcttgccctaaatctgcagctccatattttgaatccaggtcttgagatttgggaaataaaaaactttatctgaaaagtgcaagtactttttctccctttgaactatgtattcaaatgtatgtatctgttgaaactgttcacaattgccacaagtagttataaattaaactaatgccacattggacactatatcccataccctaaaccataacaatatatatctaatcaataatcaatgttatttctgtaaacaaatataaatttctgataaacaactttgtgtcagcccactctgtgtttctcttattgtctttacaaatcttcttgtaactgctgctaatcaaagtgtagatttcaggcaacttgaatatttgctcccaggttataatccataaacttgacccaaataagctgtctacttatattcacgttgtgtcagctttttgtttttttcatgtagacttatcatttagaatgtgctagaacagcctctattaggggatctcttcaccaaaggatgcaaagccaggtggatcctacctagaatctgtagataaggtctgtcctctgccaggaatttacaaaaaagggtgggagtttggataaagaatgtacagaaaactaacaaaaggcattttctgtattgtgagatgtcagcaaagacagcttacagcccccatttgggagtgtggcattttgagattttcacatcttgttcattgacctgctacagtgatgtgagaggctccaggaggaactagcatctgatggcagaatctgtaaatgtaaataagcatcttaggagtgagagatcaaggccacaaaatatccagagccatgaccacaactatatttacctgtaaaatgtgatactggagtagagtatttttgttctttctcttatccaagagctagcaaatcaggacaggagatccaggttctggagctccaccaaggcagttccattttctattcagaatcagcctcagttcctccagcctggcttatcattgggccatgagcccagggtcactgagaattctgtcacaatcatctagatgtctttgaggcattggaggatgtcagagcagaattgtgtcaggctgacaagaatggttttttcttctgtctcagtgtaagagaaacgagtcatcctgtgtttgttcctcctgtcatacaagaggtgtctttggtacccagatgagagtttctccagtttcctggtacttggatgataaacacggagatctggagacccaaatagataagctagttgcttccatttcatatggccattaaaaaaaatacatgaagcagtcatggttccaacaatccagaaacttttagtctagactagcaactggataaataattgaattatgcaacatatggttggtacaacaaatacacgtgtccaaaatactgggctttatttaggccactttctttatgttgttgtgacttctgatgtctacacccgaagggctatttatgaacagaagaaatattattatgctttttttttttgagatggtgtctcactgtgtcacccagactggaattcagtggcatgatttcagctcactgaaacctctgccaccagggttcaagcgattctcttccttcagcatcctgagtagctgggattacagatgcctgccactgcacacgtttgagcagaccaattatgaggcaattctcctaactctgcttccagaagagtctccctatcaattactgaatacccattgtggttttttccctcaatcacatgggaggaacggtctatcatcctgtcctgaagggagttcctcctaggtcagctcagacttttgtatggtaatgaagatttaaatcccctgttaggaaacctgctggacactggtgtggccttcttagccttactcttttgtcttggacaactgtcctccagatctgtcactatctgaggcgtcccacgacaggcagtcactagatacttctcccagccactaagttgtgactggagaactttgctgtcttcacatgcttttctaattatgcctgaaagcccaaatcctttgttagggagagacatcctagcaaaagcaggggccattgtacactagaattaggagaaggaaaaagggtaaatatatatacagactctaagtatgcttacttagtcctccatgcccatgcagcaatatagagagaaggggaattcctaacttccaagggaacacctatcaaacatcaggaagccattaggagagtattattggctgtacagaaacctaaagaggtggcagtcttatactgctggggtcatcagaaaggaaatgaaaaggaaatagaagtgaaccgccaagcggatactgaagccaaaagagctgcaaggtgggaccctctattagaaatgattatagaaagacccctagtatggggtaatcccctccaggaaaccaagccccagtactcagcagaagagatagaatggggaacctcaggaggacatagtttcctcccctcaggatggctagccaccaaagaaggaaaaatacttttgcctgcagctaaccaatggaaattacttaaaacccttcaccaaaccttttacttaggcattgatagcacccatcagatagccaaatcattatttactggaccaagccttttcaaaactatcaagcagatagtcagggcctgtaaagtgtgccaaaaaaataatcccctgcactgcaggccatacatttcaatccctgtatcattaacctccttgttaagtttgtctcttccagaagcaaagctgtaaaactaaaaatgttcttcaactggagcctcaggtgcagtccatgactaagatctaccatggacccctggactggcctgctagcccatgctccaatgttgatgacattgaaggcacccctccccaggaaatctcaactgcatgacccctactacaccgcaattcagcaggaagaagttaagagcagtcattggccaacctccccaacagcatttgggttttcctcttgagagggggatgactgagagacaggactaactggatttcctatgcctgctaagaattcctaagcctagctggggaaggtgactgcacctgcctttaaacatgggacttgtaactcagctcacatctgacaaatcaggtagtaaagagagctcacgaaaataccaattagactaaaaacaagaggtaaagaaataatcaaatcatgtatcacctgagagcagagggggagggacagtgattgggatataaaccccaggcatttgagtcgggagtgcacaaccccctttggatcccctcccattgtatgggagttctgttttcactctattaaatcttgcaactgcacactcttctggtctgtttgttacggctccagctgagctttcacttgccgtcgaccactgctgtttgccgccatcccagacccactgaagacttccacccctccccctccggatccagcagggtgtccgctgtgctcctttgccactcccgattaggctaaaggctcgccattgttcctgcatggctaagtgctcgggttcatcctaactgcactgaacactagtcgctgggttccacggttctcttccatgacccacggcttctaatagaattataagactcaccgcatggcccaaggttccattccttggaatccatgaggccaagaaccccaggtcagagaacaaagggcttgcagccattttgtgagcagctgccaccatcttgggagtggcctgccaccatcttgggagctctaagaacaaagacccaccccttaactaaattgctggtgtctgtgctagaaaagggcacttgaggatgggaaaggagaaacttttatttttatcttcatggagcagcttattgtttttgaatctctaattgtttttgaatctcttctattttaaaggacataaatgggtggactttttctgtctttgtttttctgccatttgttgtcatgctaggaggtagacatgtggcactgacacctttaaaggcatattctccagatgcaggtgtaatttctccagagaatgtcatttgataaggaattccagagaaggaggagaaagaaaaaaaaatggcttttcttcaggtaaacatgtctcagatgcagagctgtgtccactttgcctcctggactgccatgcatttagcactcagaaaactttacatctgtacatgtgtttatcctccctaatgagtttggttgaactacttaaaattcttatggtagtcaagggtctctgaaaaatatttctttcctatattccagagccttctctacattctccatgtcatagcttcttatatgccatgcagaattcttagcaagaatttatgatcctcaatgtgggatacagtaaatttgtcctcaaaggtttcagcttgttaacttcctttaaaattgaagaggggaaattaagtacaatgagttctgaggttctcttcaaagaaccaaaatgtcagtatgttcatctttcctgttctttgttctctattttaaagttcaacttcctcgatcttaatgtctccttgctcctagtttcagtaaacaatcccttctaactcatgtatttagggtcgttagtcatccctagtcacctgctctgtcctgagtcactcctactcacctgacttatacccatccttcctgctgactattcatcccaccactctggctcttaccattgctctctttaaaatagccaatcagaattagcttagactgtggtccaaccctagccaatagcagaaagacacagcaatagggactagtggtgttagcgataaggcccccttcccctcccttgcccaagtgtactcttgccattgctccatctgtgagacacacccttctatagaagtatatttgccttgctgagatgttctctttttgagtgctcattttccctgagactctgagcaattgtttccaacatgcaatcttaaaaatgtttcctttgtagctgttgaacatgaaaagatatggatactcaagatttctactggggaaaactgtggtccttagttaagatggagaatatgtcatgttgaggctccatctgtgttccattagctctatgcagaacaggattaagaaaatgcttatttaaatggaatggcatttattacccagaaagttctgaaaaaagtattaggagatagctgctctctagggtgctaaatgacgcctacttaaaattcctactaaaaattacagaacataggagttatctgtactttgaagtttgtataaaacatgttcctttatggttaaattcatattttacttactttttttgggaggaatatgttggggtggccagaccaaacaccaggtcgtgggggtgacaaagtctgatggactcaatcctttgagtcctttgagaaaaagacagtttgagagagaaaggtgggacaccagggggccattgcgatcctcgaggctgtgaaggcccagagctctgggagcccacgctgtttattggtaatccaacagagaaacaggtggtgagaatgtggaggtcgaaaggacaggcacatgatctacagctgtgaaggtttagcatttataaggaacctgttctgctacttgagataatgggaataggagcctaggagggctagaagcaaggaaccagcaagtctagacacattccagaggacattatgtcagtcatgcaagccctgcctcagctttcttcccaaccctcaacttttttctcaacaggaatatttcaacagtgatgctgtattcttctgtgcgcattagcacatcataaaatttgtcctagtgcacttaatggtgaatgattcacttggtgaaatagctctgtaacagatttctttcactatagagttaattattttaagtatctttgtgcagctgatatgtataaaccagcacatttaatctggcagctgtccttttttcttattttttctacatatttttgtttggaaaatgaaggctctttgtttacaggccagaaaaactgggaaaaacaaaggttcttccacttggtggatgtttgacaaaatatccttcttgggccaaaaacattgacattattcgtgagcttgttagaaattcaaaaaatcagactttatttcagatcttctggaaaaaaaaaaagaacctgcataacaaggtcttcagcttattgtacatattaaaatttgagaggtgccttctaagtcaccgtgtcttttctgtctgaaaaatattcacaactcattccgtatgatctaaatatagcactcaaaaatgtacatgttcatgttcatgcccttaattttataatttattatctagaaaaatatcatatatgaactgatgttgtggatcctattctgctcttttttctcaggcaatatattagaaaatatttttgtgttggaaattgttttattggataatttagtgagtcttgtaagtcagaaccaattctctttactctccaatttcaccttaactcaaattacaaactttgcccatgaccacttggtaaaaatgtgtgtgtgtatatgtgtgtttttcagggaccattggaatttagagatgtggccatagaattctctctggaggagtggcattgcctggacactgcacagcagaatttatatagggatgtgatgttagagaactacagacacctggtcttccttggtgaggataagtggaatacataattcataatataccctaaaggttgtttttatgtttttttgtggaatgatttttagtaatgtattgtttgcataagagagttttagatcccccttttcctgaaaatcttcagaatttcttttagaagtgaatttcttcaagatgtttcatcttaatttaaactttccactttcctgagatgagctgtattcttcactctaaattagtggtaattccagaaatttagtggcataaaatattgttacctccacctgaaaatctaattgccaccaccaacttttgattcagtagcaccaggtaataaaatttaaaaacctacaaattaggacaaggcgcagtggctcacacctgtaatcccagcactttgggaggctgaggtgggcaggtcgcctgaggtcagcagtttgagactagcctaaccaacataaagaaactctgtctctactaaaaacatgaaattagcttggcatggtggcacatgcctgtaatcccagctactctgaaggctgaggcaggagaatttgttgaacctgaaaggcagatatttcactgagctgagattgcaccattgcacaccagcctgggtaacaagagaaactccgtctgaaaaaacaaaaaacaaacaaaaaacaaaacaaaacaaaacaaaaaaccacacacacacaaaagaaacctatgatttgaaagtattttctaaatcttttgaaattttttttataactctattttggaatttactagactattttatcacatcttctctgctgagcacagtactagcttgtaattggagaatatgaggaagattcatgttatttatttttaataaaacaggtattgttgtcactaagccagacctgatcacctgtctggagcaaggaaaaaaacccttcactgtgaagagacatgagatgattgccaaatccccaggtaggtgcgagtgaaaatgaatacaacagacaacacagataagaggtcccaaggtcaaagagaaagccggtccttaaaatgtgatttaggaagctgtgttccaaagagaatagttcctgggattctgttttttgttttgtttttaatttggctctcacaaagggacatcttctgtcttatgcttttaaattttctaaggattctacttttctttcggtgagcttccttcaacttcacagtgagagccagagtcctcttcatggcatataagagactgcacaatctggctgcttttacatcgtcttggggacacagaaatatctgcatgactttgagaaactaaactgtttttagtctttttgcatcaggcctgaaatgtgtgagggcagtagtatcagtttcatttctttgttcatttttctgcatggtccattctgtttttattactatatagtcttaaaatatcatttgaaagtataagtatgatatacttctgctctgttctttttgtcaagattgctttggctattcaaagtttattttagtttcatgtaaattttagaattgtattttccatttctgtgaaaaagataccactgcaattttgctaggaagtttattgaatctatagatcactttggataatatggcacttgaataatatttattctttcaatctatagacataaaatattttaaaatttatttggaacttctctaattttttctttttttttttttttttttttttggtaaagagtttttacctccatggttaattttttttctcagaaatttattcaatgctatagtaaataagattttttctttttattttatgagagtttaagtatataaagctgtacatatacttgtatgttaattttatgttttgctaatttactgagtatttattatttgagacagtttttactctgtttatgatttttaaaatataagattgtatgatctagaaacagcaactttttacttatttttcttcaatttcaatggattttttatttatttcactaattcttctgccacatatttccagtgctacattaaaatagaagcattgacaatgagcacaatatagttttgcattgctgtctgaatttgatgaagcaaatacctcttcaggttttctttttttgagacggagtcttgctctgtcacccaggctggagtgcagtggcgcgatttcgctcattgcaagctccgcctcccaggttcacgccattctcctgcctcagcttcccgagtagctgggactacaggcacccgccaccacgcccagctaattttttgtatttttagtagacacggggtttcaccgtgttagcctggatggtctcgatcttctgacctcgtgatccacccgccttggcctcccaaagtgctaggattacaggcgtgagccactgcgcccggcccaggttttcataaattggttttagaaggtaaagatcttttgttgggcccttagtgtgatgagatgccctctgaattgatagtgaagaggggttgtagcttggtcacaaggctgctgggtctgcactagggtccacctttagttggcttgttacaggggcttgggttgttgtaattctcattttatttttggacaggctgaatatccttcaggactttgctctgtagggcagacactagggcatgtttttgcagtcgggtctgcatatggtgggccttgtatcaggatgtggatgagtatggctctgactgagtaccagacagcatttcctcaggtaactgtgtgggtttctatgtgggcagaattggccatgatctgtggctcaggtaactgacactgagtcattgaaccgcttcagggaccccagtaaaggccaatgtcttcatgcctgcctgtatagctataattgggtgcctttctccaggtctctggagtggcagaacctcagccagactgtggctgggaggagtttgggatggttacagagtaagttctgaattctcagcgggaccaagttgggtaaataaacccgatcctggtctgtagccaagaacagcggccctttagtttcccacctaaatgagggcctgccttctgactagaaggcttctcaatctttagctttaacagcatttcacaactccctccctggatctcaaatctctcttagaggcccttattttggaatggcatcttgctgcataatgcatgcaggtctcaaaatcctggcctgaagcagttctgtaaccttaatgttccatgtagctgtcattacaggtgtgaaccataatacctttttctctcataaaggcatttttgtcagggatggctgacttttttttgctgtaaggggatatgaaaataggacaatttaactctttccttcttactgatgtcactctccatatacatttttactttctattttctatttcaaatttgtctgcaattttagtttcagatatttaggacaatatgccagaatttgatggtatacttgaagtgaattacataattattgggcacccaatatttaactaaatatgataaataactaaaatagttacttataaatcgaagctttgctgcaggcaaaaaggaattataggattttcatctacttttttcagcctatatctaaataatatagattatttcctaatatttgttttacatatcagagggtctaaccctattctggaaaaaaaatatatattttttctatatttaacaatgtaagtctactcttttcttctaaagttggattacagcagttgcgttttgtgtaagaataccatatatttaaaacatttgttttttaacaaatctagttttaaatgctaatttattaaaagtttctcattagaatcttctatttataattatgctgcatattctctgaaattttactgccacagagtgcatgccaatgattcaaaatacctgtatatgatgaatacatagtgatggttaaatattgcagttacttagacaaattgttaaaaaaaattttttggagaagtagttactctctctcacccaggttggagtgcagtggtgcaatcctggctcactgcaaccttcacctcctgggttcaagcaattcttgtgcctcagcctcccaaatagctgttattacaggcacttgccaccactcccggctaatttttgtatttttagtagagatgaggatggggtttcaccacgttggccaggctggtcttaaaactccttacctcatgtgatccactggccttggcctcccaaagttgctgagattacaggcatgagccaccgtgcctggcctgactactttttttaaatgatacattaatgtagcataccagattttatgagtaaacattcttttattattgtttgtagttctatattagtgtgtttcttcagtgtaggtttctcttttttttttttttttttgagatggagtctcattctgtcatccaggttaaagtgcagtggcacaatctcagcacaatctctgccttctgagttcatgccattcttctgcatcagcttcccgagtagctgggactacaggcgtgccaccacaactggctaatttttgtattgttattagcaacggtgtttcaccatattggccaggctggtctcgagctcctgacctcgtgatctgcccacctcagcctcccaaagtgctgggattacagtcttgagccaccgtgcccggcttcagtgtaggtttcttaacatcagtttattgtgtctattggttttacttatgtagtaagtagagaatttgcaattctttttgtatgctttaagtcaatttgaggtttagctaagagataaattatgcatctctatcacagtcagattacatatgtatgtgtgtttatctataaatatttagacaatttgcaattctgtttgtacactttaagtccatttgaggtttaagagataaattgtgcatgtctatcacaatcagattacataagtatgtgtgtttgtctgtaaatatgaccccaattttagatattttttcttagctgaatttcaatgggagttttatcttgtctaagtgagtagtcatggagatagtcttactttcaccatgtgtttaataattaatatatatttttccttttgtgagagaaacacttttgtgatctgaaggtaattttcagaaagatgtataattctggattttttttcaatttttctttaaaagcattgttttaaaaacacataacataaaatttaccatcttaaatttattaaagtgtacatcacagggtcaggcatggttgtggctctcgtctgtaatcccaggacttcgggaggccaagacaggaggattcctgtagcccaaaggtttgagaccagcctgggcaacatatggagacccatttctgtaaaaaaaaaaaaattaataatagccaggcatggtggtgtgcagctgtggtcccagctacatgggagattgaaggggagtcaaaattgtgcctctacactccagcttgggtgacagagtgagactctgtctccaaaaaaaaaagctgtttatttcaggcatgttgttatgcaaaagacttctagaaactttacatcttgcaaaactaaaacttagtacccattaagaaacaactgctcattttaccctctctccagcccttgacagacaaaccttccactttctgattttatgattttgactacttatttcatataagtgaaatcatacagtatccataattttgttactgtattaattcaagtgacacaatattctcaatgttcatcttaaaatgtgacaagattgttctttttaaggtggaataatattccattgtatgtatatgttactttttttgatgtttataaatcgggagacatctggattgctttgggcttttggcttttgtgaatacatatacaataaacatggattttcaaatatgttttccaggtcctgtgttgttttgctttgttttattttttttgagatggagtcttgctctgttgcccaggctggagtgcagtggtgtgatcttggctcactgcaacccctgcctcctgggttcaagcaattctcctgcttcagcctccctagtaactgggattacaggcacccactaccatgcctagctgattttttgtatttttggtagagacggggccaggctggtctcagactcctgacgtcaggtgatctgccccctcagcctcccaagttgctagatttacaggcttgaaccactgcacctggactttgttacatattttggatatagatttctaaatgaggaacatttataactttttaaaataatggctgtatctttgttttccaccaacgtttaacatgggtttcatttttattgcatcatcaagagattcgatgttttctaaaaaatttatagtggccattctaatgggtgtgaggtgattttgtttgtcattgtgggtttttctttttcagttctctataaatagttttttgtgccctttcaaatgctttttctcatttgtgtacttttctaatgaaaacttgtttatctatttctaaattaagttattcacctttattgtttagttttaagggttgtttatatattttgaatattaacttctttcacatgtaatttgcaaatgttttcacccattttctaaaggacgttgttactcttgaattgttttttaatatgcagaaattttgatgtctagtgtagttaaacttttctgttatttcatttattgctcatgcatttaatttcttatctaagaaaatggtgccatgaccaatgtgatgtctttttcctatatttttttgaaaggatttgttagttattttatttctcagtattttatttaaatactgagatctctgtgcctcagcctcccaaagtgctgggattacaggcatgagccactgtgcctggcctcctttatttttgagatagggtctcactctgtcaaccaggctaacttgcaaggctcagtgctacccaaacctcccaaattcaggtgatgatctcatttcagcctttcaagtagctgggttacaagtaggtgccatcaaaccctgctagcttttctgtattttttgtagagacagagttttgccatgttgcccaggctggccttgaactcctgggatcaagtgatcagcctatcttagccttccacagtactaagattacattttattttattaagtagtttaattaattcatacttaaaatgattgcttaaagaaaaattaccagttatataattattgtgttatgtgtttctaatagttatgttctcatttcctattttattttcttaattttcatttaattttgtactggtatgctttattttttatttgcttttgtatactttctataaattttatctttgtaatcatcttgaaatgtggagattacatacatcttaaagttaaaactatattttaatcttataagaacttcaattgaatacaaaaactatgcctctatattttcagcttataattgatattaaaattattttatatgctgtatttattaacagatttatgcagatttttttttttgggatggagtctcactctattgcccaggctggagtacagtggcatgatctcagctcactgcaacatctgcctcccaggttcaagtgattctccttcctcagcctcctgtgtagctgggattacaggcatgcaccaccatgcccgcctaatttttgtatttttagtagagagagcgtttcacaatgttggccaggctggtcgcaagcttctgaccttgtgattcacccgcctcatcctcccaaagtgctgggattacaggcatgagccgatgtgcccagtcgatttattcagattcacatattgttttttatattctataaaaaagaactttaaaggtttcatgtataataattttgattttttttttttttttgagactgagtcttactcttgcccaggatgaagagcagtgaagggcagtgggcactattgcacctggcctttttattattattatttttttgagatggagtctttctctggcacccaggctggagtggcatggcatgattttggcaaactgcagcctctgcctcctgggttcaagcaattctcttgcctcagcgtcctgactagctgggactacaggtgtgtgccaccacacctgggtaatttttgcatttttagtagagacggggtttcaccatgttgtttaggctggtctcagactcttgatctcaggcaatccacccacctcggcctcccaaagtgttgggattacaggcatgagccagcatgcacaacctcttgtagtacatcttgtaggactgcgcaaatgctgatgaaccctcttaacttttattttggaaagtctttatcttctttttgaagtaaaataatttaaaatcgagtattgctggttagaaatgtttttttgttacatcaaaatttgggaagttctcaacttttttgttttttttaatcttcaagtacttctgtatttctttttccctatattctaagatttcttttatgaatacattgatctacttgacggtatccaataagttttgtgttccatgttttactgctttttttgcaatttaatatttttgtgttatatatttttgggtatgtcacatcacagcaattaattgtggtttgatttttttgtttataattgtatatgacaatatttaactctgtaccacttaagacagtgtggagcaaaattaaatatgaataagccatatgtctattaccaatataattatttctgtttcttttcctgtataaatattatccctgtagttttgtgtcacttgtgtgtttgttgtgtaggtttgttgtaacggttttttatttttttttcttttttttttctcctttgagagggagtttcactcatgttacccaggctggagtacaatggcaggatctcagctcactatacaacctctgcctcctgggttcaagcccttctcctgcctcagccttccaagtagctgggattacattcgtgcactacaacgcccgcctaatttcattcatactttagtagagacagggtttcactatgttggtcaggctggtcttgaactcctgacctcaggtgatctgcccaccttggcctcccaaagtgctgggatacaggcgtaagccaccgcacgcagcttgtaacagtgtttttaatcctgtctaggtgagtagtcataaaaactctcctaatcttgccgtgtgcggtggctcacgattgtaatcccagcactttgggaggccaagacgggcggatcatgaggtcaggaaattgagaccatcctggctaacacggtgaaacccgtctgtactaaaaatacaaaaaattcgccgggcgtgttggcgggcgcttatagtcccagctactagggaggctgaggcaggagaatggagtgaacccgggaggcagagcttgcagtgagcggagatcgcgccactgcactccagcctgagggacagagtgagacctggtctcaaaaacactcctaatttcaacatcaatttccttgtgaatctatcttatttttgtgtgtcagaaacacttttggatttgaagataatttcaaaacaatactaactctgtatttttttaaggtattattgtttacttatgtgttatgtgtcaaaaaataataaaatttataataaaatatttctaggccgggcggggtggcttacgcctgtaatcgcatcactttcagaggctgaggcgggcagatcacaaggtcagaagatcgtgaccatcctggccaccatggggaaacatggtctctactataatacaaaaaattagccaagtgtgttggcatgcacctgtaatgccagctactgaggaggctgagacaggggaattggttaaacccgggaagtggaggttgcagtgaaccgatattgtgccactgcagtttagcctgggagacagaatgagaagtatatatttctaaatattcagtttgttcatattaattatattgacattgttatgcaacatatcactagaatgtttttatcttgcaaagctaaatctctatacacattaaacaactaccaattcttcccatttcgtggcactcttcaaacaccacattgttttctgtttcaaagagcataactgatttatatatcttatacaatatctgtctgtttgtggctggctcattttgcataatgtcatcaatatttatcttaataattgttagaatatgtgttgtatcatttctatatatttgtacatttattaattatttgtattattattttatactctaattccgtttttgtcatagaaagtaatctattttcagctttaaaaaatgtgttatgactttgtttttggcctaacaggtggtccataaagaagaaagttgtatgagctattgagaaggctgtgtatcctgatgttgttgaggagtgttctctataccttcattagaaataattgttttttactgccttctagtcccctgttcccttactaatattctgtcttgttttattattataacagaaaatgcattactgaaatagcctattataattatatttctctctatgtgtttattccgttttcttactatttgctttatatatttgaaaccctaatttgagacacacacgcacacaaatacacacatggataaacaaatttgtcataggtccccagcgaatgaatctacatattgtttaacatctttttgaagttttgacttaaattacattttataaaatatgacagtttttgacttaagatgtagcttgtgtaatactattgtgacctcttctgctctcatttggttaatatttacatgacatttctacttccatcttgccactttcagtctttttttgttattagatctcaactgactcttgtagaaaggcaagttaaatcttgatttcacaaaatttttaataaacttttttattgaaagaatgtctcttgattggaaagataattatacatataaaattttaaatagttttctgaaagagaaaagcttactaatgttattttattttttgttttatttgattcttgtatctttgtctctcattttcctttctgttttttttttttgtattaatatgctttcaggtttttaaaaattttcttttgtgtatctttacagatattttcttagtggtaccatgggggattctataaaaactctaaaagatccaacaatatatttgaatgtggtaaaaaaataacttaagttatatgcaaaaattcttcatcattacatctgctgctccgaaaatgctcttatatgtgaattttgaaattttacttatatatgtgtttgttataagtatctttatgtgtatcctagtttgtttgttcagcttttttatgtttacatcatttttcttttgataaatttttcagttactttttgtaatttttatatccaaaatttttattttttgctattttaatatttcttgttatcctcattttcctgatcttcagtagttgtctgtgtttccatttcacttactgtatattattatgttttatttatttctgtatttattttatctgagatggagtcattttctgtcaagctggaagcagtggtgcaatctcggctgactgcaacctctgcctcctaggttcaagcgattctcctgcttcagtctcctgagtagctgggtacaggtgctttccactatgactggctaagtttttgtatttttagtacagacagggtttcaccatgttggctatgctgaccttgaactcctgacctcaaatgattcacacacctcaggctcctaaattgctggtattacaggcgtgaaccactgtgcccagcatattttattttatttttgagacagtcttgctctgttgcccaggctgcagtgcagtggtacaatctccactcactgcaaccatcccctcccaggttcaagcaattcttgtgtgtcagcctcccaagcagcttggattacaggcttatgccaccatgcccagttaatttttgagtttttagtagatacagggtttcaccatgttctctaggctggtctcatactcctgacctcatgtgattttcccaccttaacctctctgtgttgaaattacaggaatgaccaccaaccctggcctgttcaatttatttggaattttaaaaattactttatatgctttttatagttgcttttgaaatgtttttcattgggccatgtttctctaatattttgtgtacattgcaatctttgattgagatttggacattgacaaaaagctacctgttacaatctttttataatatagctttgtcctggcatagtctgaaatcaatagtcttggctagagattctgggaatttctcaaacatgttcttaggatgtgtcttgtctaaattttgtgtttattgtttagttaaatggcttattttttttaataatcagtaatcacttgctgcagccattccctgtttggggtactgcagtttctctgcttctctaacatttatctttagactcagtagactcaaactgtcattccaatgtatatcaccacttctttaagcgttttatgtcatgggagacattaaccagtgtctaagaagcacatagaagccagaaataaagatgtatgtgccaatgtttttctttaaaaaaaaaaaaaaaagaattggcaacttacatttgtgtgtgtgtgtgtgtgtgtgtgtgtgtgtgtgagagagagagagagagacagaatgtcattctgttccctatgctgaagtgcactggcatgatcttggcccaccacattctctacctccacagttcaagcaattctcctgcctaagcctcccaagtagctaggattacaggtacctgttaccatgcctggctaatattttgtatttttagtacagatggggtttcatgatgttggtcaggctggtctcaacctcctgacttcaggtgatccacctgccttggtctcccaaagtgctgggattaaaggcatgagcctgggtggaaatttctttttctttgtttcgtttcttttcttttttttcctttcttttcttttcttttctccttccttccttccttccttcctttcttccttccctccttccctccctccctccctccttccttcttctggctctgctgcccagggtggagtgcagtggtgtgatcttgggtcaccgcaatctccgcctcccaggctcaagcaattctctgcctcagcttcccaagtagctgggatttgcccaccaccatgcctggttaattttgtttgtaaatgtaacctgtatttatcagaatctagcaattgaagtaatgtgttcttattgtttctttcagttatgtgttttcattttgcccaagatgaggttaattttgtttgtaaatgtaacctgtatttatcagaatctagcaattgaagtaatgtgttcttattgtttctttcagttatgtgttttcattttgcccaagacctttgtccagagcagagcctaaaagattccttccaaaaagtgatagtgacaagatatgaaaaacgtgaatatggcaatttagagttaaaaaaaggttgtgaaagtgtggatgagggtaaagtacacaaaagaggttataatggacttaaccaatgtttgacagctacccagagcaaagtatttcaatgtgatacatatgtgaaagtctctcatatattttcaaattcaaacagacataagataagagatactggaaaaaaacctttcaaatgtatagaatgtggcaaagctttcaaccagtcctcaacccttgctacacataagaaaattcatactggagagataacctgcaaatgtgaagaatgtggcaaagccttcaacaggtcctcacaccttacttcacataagagaattcatactggagagaaacggtacaaatgtgaagattgtggcaaagaattaaagtattcctctacccttactgcacataagagaattcatactggagagaaacggtacaaatgtgaagattgtggcaaagaattaaagtattcctctacccttactgcacataagagaattcatactggagagaaaccctacaagtgtgataaatgtggcagagcatttatttcatcctcgatcctttatgtacataagataagtcatactgaagagaaaccctacaaatgtgaagaatgtggcaaagccttcaagctctcctcaatccttagtacacataagagaatccatactggagagaaaccctacaaatgtgaagaatgtggcaaagccttcaggcgctccttagtccttcgtacacataagagaattcatactggagagaaaccctacaagtgtgataaatgtggcaaagcatttatttcatcctcactcctttataaacataagataagtcatagtgaaaagaaaccctacaaatgtgaagaatgtggcaaagccttcaagcgctcctcaacacttactatacataagataagtcatactgaagagaaaccctacaaatgtcaagaatgtgacaaagtcttcaaacgctcctcagcccttagcacacataagataattcatagtggagagaaaccctacaaatgtgaagaatgtggcaaagccttcaagcgctcctcaaaccttactacacataagataagtcatactgaagagaaactctacaaatgtcaagaatgtgacaaagccttcaagtactcctcagcccttagcacacataagataattcacagtggagagaatccctacaaatgtgaagaatgtggcaaagccttcaagcgctcctcagtccttagtaaacataagataattcatactggagcgaaaccctacaaatgtgaagaatgtggcaaagcctttaagcgctcctcacagcttactagtcataagataagtcatactggagagaaaccctacaaatgtgaagaatgtggcaaagcttttaacttgtcctcagaccttaatacacataagaggattcatattggacagaaagcctacatagtgaagaacatggcaaatctttgaaatattcctcaacccttaataaacataagataattcatactggagagaaaccgtataaatgtgatgactgttggaaagcctttgaccacccctctactcttactaaatatgagaatttatatgaaacataactcctacaaaaataaagaatgtgacaaatcattttaaggaagttctcaacccttactacacataattcatactggacggaaactctacaggtgtgaaaaatgcagcaaagcctataacaagttctcaattctttttttttttttttaagaaggagtttcatgcttctcacccagcctggagtgcaatggcacgatctctgctcactgcaacctcttcctcctggttcaagccattaacctgcttcagcctccaccaccatgcccaactaatttttgtatttttggtagagacagggttttgccatatttaacaggctggtctccaactgtgattcacacaccttggcctcctaaaatgctgggattacagtcatgagcatccatgcccagccacaagttctcagttcttaagagacatggtgataattcatgctgaagaggaactttacaaacttgaaagatgtgacagtgcttttaccaccacctccaacttttctgtacataaagatgattatactagtgtgaaaccctagaaataatagaaaatttgacaaatcctttatatggttgcaagacttgattgtaggtaagataattcatactggcaaaactcctacaagtgtgaagaatgtgggaaaactttttaatcagtgcatacaccttatttcacaggaaagctagtatccttgagaaaaattgcacaattataaaaaatatggaaaacccattaatgcctactcacatcttacccaacagaaggtggttcacagttaatgaaagcatttaaagtgcaattatgctcaagaaatctttcagaaaatagaagcctttaaagtgaagaagagtattctgaagacaaccattacacatataaagggggttgtattacctttacttgcatcacagatttcattgcacacattttgtactagaggaaaaccctgaagcagttgctccagctttgttcaacaacagggaatttatgttagagaagaatcctgcaaatgtagtgaatttggaaacaaattttttttcaaaaactacagcttagaaaacaccagagagttgatactaaaatatatgtttgcagaaacagtaaatataaaaaatatttaattcaaaatgaattccatgtaaatatcagagaatttacagtagaataaggcactgatacttcagacattacactaaaacagtgttgagtataaaaaagaatccacaacaaaaattgttagataaattatatatagctttaaaaggttttttgaagcattgtaattacattgaaagtatacttgctttcttgagaaaaaatttttgaaaagtgaataaggtaatagagctttcaaatttatgctgttactttatttctattcacatgtgaaagcatgtgatcaattgatgctgcatcagagatattacagattctttattgggcattccttataaccttttctattaaagagaaaggatattaaaatgtaagatgcatgatgaaaatataagtggacaggctgttcgtatttgacctatattaagtaatgtataaggtagtgttcagagtaatacttttctacattatagtgagagaaattatgaattacagttaaaggtatattaaattactgtattattttactaattttatgtaataaaatacactacattaaaaaattgttagattgtgtgtgaagttaattttgttgtatccatttatttttttttttgagatggagtccactttctcatccaggctggagtgcagcagcgcaatctctgtgtgatcattgcaaccttcacctcccaagttcaagcgattctcctgcctcagtctcccaagtagcaaggactacaggtgtgtgccaccatgcccggctaattgtttcaccatatcagtcgggctagtttcgacctcttgagctcaagtgatccacctgccccggcttcccaaagtgctgagattggcctagttttattttattttttaccatattaagactattttgcatttaatgaagccatattatgccactaactttaacctatcccaccttactcaagggtatagttacaagatggtagcagtatactatttggtatatagtagaataacatcattagtaatcactttgccagtggctttaaattaattgagttgaagaatatttttcccataggttaaatttttattcttacagaaatttattcttagtatttgtgggtatatagtatgtgtttacgtttatgctttatatggcatactgtgattcaggactacaatatgtagtaattacattagggtaaataaggtatccatcacgtctagcatttatcctttgtattacagtgtaattatacacttttagttatttgaaaatgtacaattaaattttaattgactacagggttatttttatggtcgtaataaaaattatacagaaatataaaaagaatatggccagatgaagtggctcatgcctgtaatcccaaccatttgggaggctgaggcagctggattgcctgacgtcaagatttcaagaccagcctggccaacatggggaacccctgtctctaaaaatataaaaattagccaggcataggagcacctgcgtggaggctgaagcaggagaatagcttgaacaagggaggtggagtttacagtgatccgagattgcaccactgcattccagcctaggcaacatttctgagtcctgaaaaattattaataaatatttgttacatagttttctataaacttgtggtttctctgcctgcaaacacaagagttttagttttaattttcatagagtgaaatatccacatattactctgaaggtaaaccttaggtgtaagaaaaatataaagtgagtaagtgtatttgtgagtttgctttggtacatattttcagaagaaaagcacaattattgaaacaaaacaacttattttaatttggtgaataacagaaaacaccttcaaaatgttgaaagcaaatctacactttctgctttgtattgaatttattaatgtaaaattttatagcttatgtttcaaattctttccagaatctgcctattgaagcacaggcaattttgtctccataaataacactcttgagtacaacaataaaagccctcttcaaacaaacaaattatttataacacttattttaatgaaaatgtaaccaaaagtatataattgggtatatttttgttgttctatgtgtgtgcgaatgtataaattggtacataaggacaaaataatttaagccagaaaaaaagatgttagctaatatttgtaatgaataaaactggaaagtagttaattattatttgcacataatgtctttgtttacgtagataacaaaacagcagaaagactattttaaaattttattcaagtgggtaggtaacattctaagataatacgctggattcccagtctgttgcacacctgctgtgtaatactttttccttgagtgtaaaaaaatgtgcaactggtgggaaaatcactcaagaaattaggttactcatgtgttgactttgtgtttatcaaaatggagattgtcctgactgtgctaaacttaatcagaggtgcttttaagagaaagacacatcatagaaaaacacccctgcttgcctgaaagtaagtgacttctaggtgggccatgttgcaagctgcttatggtgaccacatggcagaaaacatatttgtacattgttatcattcctgcccttctgcatgttgcttccagtagggagaatctaaggatcctatgacagggaaaaaaaggaaatctcattcatgcaagaaataatcacctctcacctgggatagcttaagagaagcaggagaccacaacagaaccacataaatgggaggaaaatggtaacctgggtaaaagtgctctctggcattatggaacaacatttagtaagctgtagtgaatggtcagcctctgggataccaatagtttaccaacaaggctgaactcattctaattcaatcagcatgtctgcatttacactatccattacagaaataccatgaagaccagtgggtaatgtcctagaattgaacttatttcaaatcatacctaattgtttttcacatttgaaaaaccttaaaaacaatgaattcataaataattaacttctaattatagaggattctactatactgtaatacaagattaaagtgtaaacaccttaagatttcttgaatgcatgattggttatgtagtttattttaaataattaacgtgataaaagtaacaaatagataaaacattggaaacggacaaaattaataaaaaccacatcttttcaatggcttggcgtaattgctatgcttttggaaatggccagattactaacaagaaacaaaaacaagattttggctttgctcagtcattgtttttgaccttctgaaatctaaaatccaggccaaagtgttgaatgggagtattttataggtggcttccttgggtttccaatgcaatgaagggaaaactttgataggcaggaaaatgcacactatatacacacattgctcttctctgatttgctttaacattgaaaaattgaagattgtaaatgtagtctcaattagagtaaattaacaaaagatttgtttttcaaaaagcaaatgtataaaattaatgggtaacagatgccattagctgctaaaaaatagtatgactaaattcagtaagtatctagccatgcaaataacagcccaattaaatgaagaccctcataggtgcatgtggaaagcattgctgtgcagtgtggtgcctccactcagcattttcttctacctcttcacagagaaaccagtttcccctgagtgactaaggatgcatactgggagctgagaatgctgtgttcagagtgattactgaaaacatggttaacacacttcttccatatgataataaaatgatataaatctttctctgcctcggaaaagcttttagtaaaagattattcaatttaggttcatgaaaaatgttaaattccagataatttagacacttaaatgtcaatgaaatcccataaaacatatttgaacagtgtttgacacgagtcgcaccgaaacaaatgctcttcacgatcattgttaaagtagcaatagcgccacgtgctttcctgggaactgctggcctgttttccactcatacaaagtggagaaggctttgaaatagcaaaggagggtgacataaattgaatacttatatgaaatttttaattaaaaatagcatttgatgttatacaactataagtgagactattagtgtgatgtcatattcttaattatattgacaaaataaccattcacagtattcctatttaaaataacatgttttgtcggctgtatatttgctagcttttggttaaatagtaccagagctcaatagcaatcaacaaaatgaatctttattttaccgcaagcattagtgatgcatatgcctgtttttcttaaagttcattagctttttgccttttccggttgcagcgccgcgcggtgaggttctctagtccacgctcgcagccatgccgtccaagggcccgctgcaatcggtgcaagtcttcggacgcaagaagacagccacagctgtggcgcactgcagacgcggcaatggtctcatcaaggtgaacgggcagcccctggagatgactgagccgcgcatgctacaatacgagctgctggagccagttctgcttcttggcaaggagcgatttgctggtgtggacatccgtgtccgtgtgaagggtggtgctcatgtggcccagatttatgctatccgtcagtccacctccaaagccctggtggcctattaccagaaatatgtggatgaggcttccaagaaggagatcaaagacatcctcatccagtatgaccggaccctgctggtagctgatccccgtcgctgcaagtccaaaaagtttggaggtcctggtgcccgtgcttgctaccagaaatcctaccgataagcccatcatgactatcaaaattcacctgtataataaacagtttttgagggattttaaagtttccaggaaaaaaaaagttcattagctttttatgaaggatttatccttttttttcagtgtgctgtttattgctgagaagtggctgccctgccagaaaactgctattctcagctgtaaccacattgactaatagtgagtggaagtgcagtggataaaaagcaaatgtgtcttctctgtatcttttttcatttattggctgaagaacaggaggatgcggaagatggaagaaaatataatctctgaaagataatgaagaagctctcctaaatagaagaaaacctcataggggatttttttttcatcattttactctctgcttctatgcgtttaaattttttttttttttttttgagacagtctcgctctgttgaccaggccagagtgcagcggcatgatcccgactaactgctccctccacctcctgggttcaagcgattctgcctcagccttctgagtagctgggattacaggtgtgtgccaccacgcctgactaatttttgcatttttagttgtggtgcggtttcctcatgttggtgaggctggtctcgagctcctggcctcgtgatttgttcaccttggccttccaaagtgctgggattacgtgcatgagcccctgcacctggtgagtttaatttttttttttttacactttacatagaaataggattatgtggactgggcacggtggtctataatcagcactttcagaggctgaggtgggtggaccacttgaggttaggagtttgaggccagcctggccaacacggcaaaacactgtctctactaaaaatataaaaattagccaggagtggtggtgtgcgcctgtaatcccaggtatgggggaggctgaggcaggaaaatcgcttgaaaccaggaggcagatgttgcagtgagccgagatggtaccactgaaccatcgcgtgcctaggcaaaactccatttcaaaaacaaaacaaaaaaattttgtgtgtgtgttttcctgtgctggcttattttacttagcataatatcgttcaggttcatgaatgttgttgcaaataacaagactcttatttttaaggactgaatagcattgcattgtgtacatacaccacattttctttttccatttacctattgatggacatctaggttgattccataccttaggtattgtgagtaatctgcttctttccttctcttttgttttgtttttgttttgtttcagatggagtctcattctgtcgctcaagctgaagggcagtgccgtgatcttgacccactgcaacctccgcctccaaggttcaagcaattctagtgcctcagcattccaagtagctgagattacaggtgtgcaccaccaaacccggctaatttttgtatttttagtagaggcaggctttcaccatgttgaccaggctgattagtttgtatatttctttcttcctttccttttttatttctagaagcatgttaattttaaaatataaattatgacatgtaaaagccttcatttctctgtctttgattactattatggctgatgaaaaaataagcttttttgaaatttcctggataaaagttattactttatattaacataacttgagacaatgtagaaatgaaaatgaacatttgatagtaaaacagcaattatctagctcctggtagtcatttagtctctcacccgctctttagaacttccaccaagacaagaactctattttttttccaagaatgtgtgatgtaaaatcacactcttatctttttgtttttgtggcagaagttgggtatttaaggttatgaaaaaaaagtataggtctccttttagtagacaggtgatgatggaagcaaatataatagtacatggtatttggccacatttcaaatgggtgatagtgaacattcactgaagtgtcatagatggctcttatttgccaggtcaaatcttctttgcgagaaagtctcagccaactgttgtcaagcatttctggtggttcctagatacatgaacaaaacctcactagactggtttactgagagcagaattaaaaacacccgggtgccaggttattaaaaacatttttacatttttacatttatggaaaaaaaaatgtgatgtggtgtgtggcttggtttgaatacatcttcactgagctaagtagctgattgaatttacctaacctgaaggaaaaaaaaagaaaaaagaaaaaacctacactgaaaaaacacacatggaactgcaagacagtgattaagaaaaatgtttactcataaactctggtacgcaacatcgatgtatcattaaaaaagtttgtcagtttgggcatggtgtctcacgtctgctatctcatcactttgggaggccaatgcaggtgtatcacctcaggtcatgagttcaagaccagcctggccaatgtggtgaaaccccttctctagtaaaaatacaaaaattagctgggcatggtggcacatgactgtaatcctagctacttggcaggctgaggcatgagaattgcttgaacctgggaaatggaggcagcaataagccaagatcacaccactgcactccagcctgggtgacagatcatgtctctgtcaaaaaaaaaaaaaaaaaaaaaaaaatatatatatatatatatatatatatatagtctaggtaactgtaatatgtaactgttacggtgtactcaccaactgcagatcttttgaatcattggcatgcactgtgtggcagtaaaatttcagagaatatgcagtatatttatacatagaagattctaataagaaactttccataaggaagcctttaaaagaaacttgagttactttttatgttttaaatgtatgctattcttacacaaaatgaaactgctgcaatccaactttagaagcaaagaatagtcttacattgttaaatatagaaaatatataactattttaagaatagtgttagaacctctgatatgtaaaacaaatattaggaaaaaactatggtattatttgatataggctgaagtaagtagatgaaaattctataattcctttttgcctgcagcaaatttaaatttataagtaattattttagtaaatatggagtgcctactaattatctaatttatttcaggcataccatgcaaattctagcatattgtcctaactgtataaatctaaaattatagacaaatttgatatagaaaatagaaagtaaaaatgtatagggagagtgacatcagtaagatgaaaagactaaaagtgctcattttcatctccccttacagcaaaacaatgtcagccttccctggcatgcctttattagagaacgagacattatggctcacacctgtaatgacagctacatggtacattaaggttatggaactgcttcaggccaggatatggagaccagcctgggttatgtagcaagacgccatctccaaaataatgtctctaagagttatttgagatccagggttgcagttgtgaaacactgttaaagcttaagattgagaagtgttctattcagaaggcaggtcctcattcatgtgggaaactacaggaccgctcttcctggctacagaccaggatcgggttcacccaacttggtcccagtaagaattcagaacttactctgtaaccatcccaaattcctcccaggtacagtctggcagaggtcttgccattccagacacttgggaggaaggtactcgtttacagccatgtagacaggcctgcagaacttggcctttactgtggtccttgaagcagtttaatgactcagtttcacttacctgagccacagttcatggccagttctgcctacatagaaacctacccaattacctcaggaaatgctctctcatatacagtgaaagccacactcatccacatcctgatacaaggcccaccatatgcagagctgactgaaaaaacatgccctagtgtctgccctatggagcaaagtcctgaaggatatgcagtgtgctcaaaaataaactgggaattacaactacccaagcccctgtaacaagccaactgaaggtggaccctagtgcagacccagcagccttgtgataaagctgcaacccctcttcactacaaattcagagggcatctcatcactctaagggcccaacaaaagaagatctttaccttataaaatcagtatatgaaaccctgaagaggtgtttgctccatcaaattcagacaccaatacaaagctatattgtgcctattgccaatgcttctattttaatgtagcactggaagtatgtggccgaagaactagtcaaagaaataaaaaaatccattgaaattgaagaaaaataattaaggtgctgctgtttgtagatcatacaatcttatatttaaaaaaaaccataaacagtacattaaaacctgtctaaactaataaatacactcagtaagttagcaaaatataaaattaacatacaagtatatgtatggtttcacacacttaaactatctaataaaatagaggaagaaaataatcttatttatttatttattttgagacagtctcagtctctctccaggctggagtgcaatggtgcgatctcggctcactgccccaatgtcagtgaaataaatggttaattgggaatagaggggcttggggaaagcaatactgggaagatatctcaatcctggcacacactaccattattactgttttcctttttttttttttgacacggagtctagctctgccaccagactggagtgcagtggtgcaatctaggctcactgtaacctctgcctcccaggttcaagtgattcccctgcctcatcctcccaagtagttgagactacaggcacatgccaccatgcccagctaattttttgtatttttagtagagacgggatttcactgtgttagccaggatggtctcgatctccagacctcatgatttgcctgcctcagcctcccaaagtgttaggattacaggcatgagccactgcaaaaattttattttctaaagcattaaatcataaatttctgaggaaaaaattaaccaaggagggaaaaaatctttacaataaagaaaaaataaaaaaattagagaagatacaaataaattttaaaatactttgtctatggattgacataatattattaaagtaccacattatccaaagtaatctatagattcaataaacttcctatcaaaattgcagtgattttttttcacagtaatggaaaatacaattctaaaatttacatgaaactaaaataaactttgaattgccaaagcaatcatgaagaaaaagaacagagcaggaggatatcatacttaaaatttcaaactatatttcaagactatatagtaataaaaacagaatgtactgtgcagagaaatgaattaaaaaaatgcaacagaaactactactctcacacatttcagacttgatgcaaaaagtgatctaatgcataattttcttttttttttttttttttttttttgagacggagtctcactctgtcacccaggctggagtgcagtggcataatctctgctcactgcaacatctgcctccagggttcaagtgattctcatgcctcagcctgcctagtagctgggattacaggcacccaccaccatgcctggctgatttttgtatttttagtagaaacaaggtttcaccatattggccaggctagtctcaaactcctgacctcaggtgatccacctgcctcggcctcccaaaagtgctgggattacaggcgtgagccaccacgcccagtctatgcagtctgttatatgtcatgaagatgaatttggctctccctgtgaagctgaaagaagctcagcgaaagaaaagtagaatccttatttaaaagcatcagacagaagatgcccctttgtgagagccaattaaaaacaaaaaaataaacaaacaaacaaaagcagctttccacgaatgatttcctttggaacacagcttcccaaatcacatttaaggactgactttctctttgaccttgggacctcttatctgtgttgtctgttgtattcattttcttcttttttttttttgttttttttgagatgactctgtcacccaaaatggagtgcagtggcataatcttggctcactgcaacctctaccttctgggttcaaagcgattctcctgcatcagcctcctgtgtagctgaggttacaggcgcatgacactatgcttggctaattattgtatttttagtagagacgtggtttcactgtgttggttaggctggtttcaaactattgaccttgtaattcacctgcctaggcctcccaaattgctgggattacaagtgtgagccactgaacccagcctgttgtattcattttcactctacctatctgggggtttggcaatcatctcatgtctcttcatagtcaaaggttttttttccttgacaacaatacctgtttattaaaaataaataccatgaatcttgctcatattcttcaattagaagctagtaatgtgctaagcagagaggatgtaataaaatagtctagtaaattaataccaaaatactaattcataatagaaatttctaaatatttagaaaatactttcactttttaggtttcttaattttactacctggtactactgaatcaaaaattggtggtggcaattagattttcaggtgggggcaacaatatttcatgccagtaaattttggaattgccactaatttagagtgaagaatacactcaactgaggaatgtggaaagtttggattaagatgaaacatcttgaagaaattatcttctaaatgaaagaatcctgaagattttctggaaaaggggcatctgaaacacttttatgcaaagaataaagtacccagaaacattccacaaaaaagggaaataaaacttttagggtatattatgaattatgtattaaagttatactcacaaaggaagaccaagtttctgtagttctgaaacttcacatccctatataaattccgctgtgcagtgtccaggcaatgccactcctccagagagaattctatggccacgtctctaaactgcaatggtccctggaaaacacacacacacacatttttaccaagtggccataggtggaatttttaatttgacttaaggtgaaatgaaagataaaagacaaatggttctgacttataagactcactaaaattatccaataaaataattttcatcacagaaatattatttaatgtattctctaactctgagaaaaaacagcagcataagatacacaacatcagttcatatgtgatatttttctagataataaagtataaaattaaaggcataaacgtacatttttgagtgctatttcatcatatgaaatgagttgtgaatatttttcaaaaggaaaagatgagttagaaggcacctcaaattttaatatatacaataagctgaagaccttctcatgcaggtttttttaatatttttccgcagaagagctggaataaagtctgatttatttatttatttttagttttttggagatggagtttcatgcttgttgcccaggctggagtgcaatggtgcaatcttggttaactgcaacctccacctcccagattcaagcaattgtcttgcatcaacctcctgagtagctgggattgcaggaatgtgccaccatgcctggctaattttttttttttttttttgtatttttagtagagatggggtttttccatgtttgtcaggctggtctcaaactcctgacctcaggtgatctgcccacctcggcctcccaaagtgctgggaatataggcatgggccaccacacctggccaattttttgaatttctaacaggctcatcagtaatgccaatgtttttggctcaagaaggatatgttgtcaaacatccaggaagtggaagtgtcggtgtttttcccactttttctagcctgtaaacaaagataagagtcttcattttccaaagaaaaatatgtagaaaaaaataagaaaaaagggcagctgccagattgaatgtgatggtttatgcacgccagcggcataaacatacctaataatacagcgaaaaataattatagtgaaaaatcagaaagctatttcaccaatcgaatcattaactattaactgcactaggacaaatttttattgtgtgctaatgcacccagaagaacacagcatcactcttgaaatattcctccccaaaaaagtaaattatagtctgaatttatgcaaacttcaaaacacagataatgcctatgttctgtaatttttagtagtaattttaagtaggcttcatttaacaccctagagagcaggtatctcctaataatttttttcagaactttctgggtaataaatgccatcccatttaaataagcattttttttttttttttgagacagagtttcgctcttgtcacccaggctggagtgcaatgatgcaatctcagctcactgcaacctccacctcctgggttcaagcgattctcctgcctcagcctctcaagtagctgggattacaggcatgcgccacaatgaccggctatgtttttgttttgttttgtttttttgtatttttagtagagatggggtttcaccatgttggtccggctggtctcgaactcctgacctcaggtgacccacctgcctcagcctcccaaagtgctaggactacaggtgtgagccactgcatccagcctaaataagcattttcttaatcctgttctgcatagagctaatttaacacagagatggaccctaaacattacatgtccaccatctttactaaggaccacagttttccccaatagaaatcttgagtatccacaaagggaacatttttaatgttatgggtcataaattcttgctgagaattttgcatggcatataagaagctatcacgttgagaatgtagagaaggctctgggatataggaaagaaacatttttcagagacccttgactatcataattttaacaagtagttaaaccaaactcattagggagcaaaaacacaagcagagaaggaaaggtttgtgagtagtaaattcatggcagtccaggaggcagagtggacacagttcttcatctgacacctgtttacttaaagaaaagccatttttttttctttctcatttttctctggaattttttctgagatgagattctctgaacaaattacacccccagcttgagaatatgcctttaaaagtgtcagtgccacatgtttacctgctagcatgacatcaactggcagaaaaacaaagacagaaaaagtccacccatttctgtcctttaaaacaatgagactcagaaacaatgagctgctccatgaaaataaaaatgtatctcttttgctgtcctcaggtgccctcccctgccacagacaccagtaatttctgctacagtaatggaaatatgcaccacactgacctgtccctaccaaattcaaacagaacaggccctgtgaccaccctttagtgcaaaggtggaacttaactctcatgaatgtgttttgaagcaatcatacttgattctggtctcaccttagagccatatgaggcccttcgttaaaacaacatggatgcttccacccagaacaataaacaagctgtggagagggcataagagatttctgcaaattagccatgtgatcctaatgagaagcctgggctgataatcactaagttaatcattgcctctcaagctttaacgagcttctaaatcacttggtaattttggccccactttatgtaaagtgattctggaagcttgaaaagggtccaggaatggttgttttatacaagtcccctgtgaatgctgatgttgctcccccgggctcattattagcattagtcagagaagcaggcacagctcagggtcccttacccttagcacttttgtcacaaccaaatgcttctggcacaaataaggacaacccatctccatcctaaagttttatattatttgctggctctttaaagtttacagatgaaacagagacctggaatctacacttcaattagcagcaattacaaaaggatttgtaaagacaacaagagagggacagagagtgggctgatacaaagttgtctgttagaaatttttatttatttaaacaaataactttgattattgattagatatatatcattatggtttagggtatgaaatataatgtccaatatggcattattattttaatttataactacttgtggcaatagcaaacattttcaagaaatgaataaatagttcaaagtgggagaaagacataactgcactttcactttaatgtctctctgagtttgataaccagaaagacttgcatttttcagataaaagttttttatttcccaaatctcaagacctggattcaaaatttggagctacagatttagggcctgaatggctggagttgcagcaggtgttaactgcacatttgtgggcattttggcaagaggaggaatgggaaagtggagattctcatgtctatatgtctaatcaatgcacagatgctactgtgattgggtttctgggctccatagtcactgaattgctttcaggtttgaagataaaagagtcattgaaaaaggtgaaatgactgattgctgcccgtgaagtttgtagaaatttggtctagcttctctagaaatgactgtagaggactacagataacaaataggctgagacacaattctgcctgcatatttaagggacagcatgcactgtgctgtgcacgtgtctgttaactggaagcctgagagaaaaagtcccctctagagtaaattctggttggcaccttatgtgtttatatcatgtctggtaattctagacagtgtttggaaacaataattaaaagaaaatttttctccagtcccagagaaactccacaataatagaacagaaagaaaatgcttttattacacaattaaacttgaatgtgatgtccatatactcaatctgcttaagagactgcaaagacagaaagatggtcaccataattagttcacaagtagaagaatttgcagcaccatgtcatacatcgttcatcctaaattcacctggagattgaagaggccatctgtgtatactaattgcttatattcaatgatgataaacttttcacatcctcataacaggaggtagtttagtagcttgaagccaggtgtctgctgaagctaggctttcactctgctacaaaaatggttgaatagtgttctatctttttggctatttacattttagagctgtggctctgtactccctggcactgggctacagcactcctgctcactttctcctggttgctactgtcttctcttgacttctaccatctgccactgaggcacagcccagagcacagctcacattttatgtgaatcccatttgccacagcagcactatagtgtcacatcagagagggaagcctgagctgcaggaggagagcctgcaggcctcctgggtagaattacaccttcacaataatcaaaataagaccagtgtttcagtctcaggttctacttataatggtgacaaggaaataatgctgctaaatttccagcatgagtccaaatagagatagctccaaaagttctttctgtgacagcccacctcattgagacaccatggaatactaatagggcttctgaaacagacaaagcattggagagaaaaacagatctccatctgggcaagatgattttgacagaagttaaaacgatcttaagaaaaagctcaggctgtctctgtctctccctctccctctccctctccctcctttccacggtctccctctgatgccgagccgaagctggactgtactgctgccatatctgctcactgcaacctccctgcctgattctcctgcctcagcctgccgagtgcctgcgattgcaggtgcgcaccgccacgcctgactggttttcgtacttttttggtggagacggggtttcactgtgttggccgggctggtctccagctcctaaccgcgagtgatccgccagcctgggcctcccaaggtgccgggattgcagacggagtctggttcactcagtgctcaatggtgcctagactagagtgcagtggtgtgatctcggctcgctacaacctccacctcccagccgcctgccttggcctcccaaagtgccgagattgcagcctctgcccggccgccaccccatctgggaagtgaggagcgtctctgcctggccgcccatcgtctgggatgtgaggagcccctctgcctggctgcccagtctggaaagtgaggaggtctcttcccggccgccatcccatctaggaagtgaggagcgtctctgcccggccgcccatcatctgagatgtgcgagcgcctctgccccgccgccccgtctgagaagtgaggagcccctccgcccggcagccgccccgtctgggaagtgaggagcgtctccgcccagcagccaccccatccaggagggaggtgggggtcagcccccgcccggccagccgccccgtccgggaggtgaggggcgcctctgcccggccgcccctactgggaagtgaggagcccctctgcccggccaccaccccgtctgggaggtgtacccaacagctcattgagaacgggccaggatgacaatggcggttttgtggaatagaaaggggggaaaggtggggaaaagattgagaaatcggatggttgccgtgtctgtgtagaaagaagtagacatgggagacttttcattttgttctgtactaagaaaaattcttctgccttgggattctgttgatctgtgaccttacccccaaccctgtgctctctgaaacatgtgctgtgtccactcagggttaaatggattaagggcggtgcaagatgtgctttgttaaacagatgcttgaaggcagcatgctcgttaagagtcatcaccactccctaatctcaagtacccagggacacaaacactgcggaaggccgcagggtcctctgcctaggaaaaccagagacctttgttcacttgtttatctgctgaccttccctccactgttgtcctatgaccctgccaaatccccctctgcgagaaacacccaagaatgatcaattaaaaaaaaaaaagaaaaaagaaaaaagaaaaaatacaccctggcagaaaacttctcgaatgtaagtaaagtgggagttttcaacttgcccacctccttacaaaaacatgcaataagaatgtgctagatataaagcttacaaatgtgagaaatacgggaagtttttcaattttaacaaatactttcaaagtcatgtgaaaattctcactagaaagaaatccaataaaggcaagttgaggcattaaaaaaaaaaaaagaaaaagctcagaatacatataagattgactaagtcagccagaaaataatcccctaaaagaaatttctctctaaacacccaatgtgcacagctactctcagcatgagaaacatgagctttatgaagaaaggtggcagattttcagaagaattttataaaagtttcttttccatctctgctgctgtctcatctcctagccattgaatgggggttctatattgaaatacatctgacaacttccaacaacactttttgatcaagaaatagaatttgactatgttcgtatagtggaatatattagaacttgtaacatagctaactgaatagctattatggtgtttgggtggccacatcacctgtctttatttgtccggtaatagcagcattccaatttaaagaaataaaagataccaaaattgtgtttacttttaattattcctattgaataaagtaataagcatgtcagactgatatctatcataacaataaattttgtttggatattatattagatataaatatttaagtatgaatacttttaatgaactagtcataatgtatgtagcatttttaaaaattgtaactatacttcagttaaaacactttatatttcaaaagcataaataacaatattaaaataacaatttaggtgattcattcaaagtaagtattggggctttatgttcatactattgtagaaaatactgcttatggctgatgcctgtaatcccagcacattgggaggctgaggtgggtagatcacctgaggtcaggagttcctgatcccatctttactaaaaatacaaaacttacccagggtggttgtgcacacttgtaatcccagctacttgggaggctgaggcaggagaattgcttgaacaagggaggaaatggttgcagtgagccgtgatcatgccactgaaccccagcctgggcaagagagtgagactgtctcaaaaaaaaaaaaactgtttaatttttatgaatgcaggttttctgcaaacactacacataactatgctaattgttctgaagtaataaatagaaagcaaggcacaactacagactccactgttcagtttatgcactgaactgttcttgcttttgcagtgtaagtatttctgcctgcaaatactggataattaccttggatcatcagatttctatcaaaggaatttagtatcttttagtctttatcattttgtattgctaaatttatctgtgtgttaagcttctatgtgctcttaaaatgaggttttatctaaacaaacctgtgtctactttaaaagactaaacatgaaaaaactaaacttttcagaaccaaaaacaaagcaataaatctgaagtactagatagtctggagtgagatttatttagcttttttttttttttgagatggagtctcgctctgtcaccgaggctggagtgcagtggcacgaactcggctcactgcaaaagctctgcctcccagcttcatgccattctcctacctcagcctcccaagtagctgggattacaggcaactgccaccacgcccagctaatttttttgtatttttagtagagacggggtttcaccgtgttagccaggatggtcttgatctcctgacctcgtgatctgcctgcctcggcctcccaaagtgctgggattacaggcatgcaaaaccgcgccctgcccttatttagctcttaatatgatttacatatatttcaaaaaagcagagaaaaatatctacatataatctaaatcccttaagaaaagagagaatagcaaaaaaatttttggaactttttaaagagttttgaactcttggacatctgaattttgcacactatatgcacttgaaagaatgttaatggggaaaaagcagaagagaaaaagacgttataaaaaaatccatgagtgcacaacacctatgaaacagaatagagagcccagaaataatgcctttcacctgcaaccatcagatttctgacaaagctgacaagaggaatgtgggaagaattctctctttcataaatggtgctggaataactatctaccactatgtagaagactgaagtggaccccttcattacaccatataaaaaaatcaactgaagataaattaaggacttaaatgtaaaacttaaaattataagaaaccctgcaagataacctaggaaatagcattctagacacagaaacaggtaaagacttcatgatgaagctaccaaaagcaactgcaacagaagcaaattgacaaatgggatgtatttaaacttaagagcttcttcacagcaaaggaaactatcaacagagtaaacagacaaactagagaataaaagaatatatttgtaaattttgcctctgaaaaaggtctaatatacagaatttattaggaacttaaacaagtttacaagaaaaaaacacactcattaaaaagtatgcaaaaaacatgaacagatgcctttcaatagaagatacacatagggctaacaagcatatgaaaaaaaaatgctcattgctaatcattagagaaattagaagagaaaccacaggctgggtgcggtggctcacgcctgtaatcccagcactttgggaggccaaggcaggcagattacaaggtcaggagatcaagatcatcctggctaacatggtgaaaccctgtctctactaaaaatacaaaaatcagccaggtgtggcagtgtgcacctgtagtcccagctactcaggaggctgaggcaggagaattgcttgaatctggtaggcagaggttgcagtgagctgagatcacaccactgcactcctgcctgggcaacagagcaagactccgtctcaaacacacacacacagacacacacacacacacacacacacacacacacacgcagagaaaccacaatgagataccacctcataccagtcagaatggctatttttaaaaagtcaaaagataacagatgctgacaaagttgcagagaaaagggaatgcttatactcctctggtgggagtgtaaattatttcaacaactgtaaaaatcagtgtgacaattcctcacagaatgaaaaacagaattatcattcgactgggaaacctcataattgagtatatacccaaagaaatatgaaatattataaagacacatccacatgcatgttcactgcagcactattcacaatagcaaagacacggacagactaaatgcctatcaatggcagactggatcaagaaaatatggtatggtcagatgcggtggctcatgcctgtaattccagccgtttgggaggctgaggcaggtggattgcctgagcttagaagtttgagaccactctgggcaacatggcaaaattttgtctccacagaagatacaaaaaaaaaaaaaaaaaaatggccaggcttggtaacacccgcatgtagtcccagctacttgggaggatgaggtaggagagaattgtttgagcctgggaagttgaggataaggtaagccaatatcacaccacagcactctagcctgggcaataagtgagaccctgactccaaaaacaaaagatttagtaaaaacaaaatatggtacataagcatcctggactactctgtggccattaaaaacaaataaccatgtcctttgcagtaacattgatgaagctggagaccattattcttacaaaacaaatgcagaggctgggtgtagtggctcatgtctgtaatcccaacactttgggaaaccaaggtgagtggatcacctgaagtcaggagtttgagaccagcctaaccaacatggagaaatcccatctatactaaaaatacaaaattagcagagcatggagacgcgtgcctgtaatcccagctactcaggaggctgaggcaggagaatggcttgaacctgggaggcagaggtgagctgagaacacaccattgcattccagcttgggcaacaagagcaaaaacaaacaagcaaaaatatctcaaaaacaaagaaacaaaacaaaaaaagaaaataatacaggaacagaaaatcaaatgcatgtcattatttataagtaagagctaaataataagaacacatgaacacaaagaggagaaaaacaggcactgaggcctagtagagggtggagggtgagaggagtaagaggatcagaaaacatacctgtttggtgctatgggtagtacctcagtgacaaaataatctgcataccaaatccccatgacataatttcagctgtataacaaacccacatgtgtacatcgaaccaaaaataaaagctaaaagaaaaaaaactccccgagtgggagagagtgcaatgtaggtgaaagaacttatttttgctacagataatggcccaggtagggctgtactctgatttacttctgtgtgaatacaggcagatgagattatgaacaagtggtccagaccctaggatggtggagaaaacaggttgctgctgcagattcagtgtctgggggtggggttatgccaggagacttgtagatactgtgggtccttttcaagaaacactgggttcaaaaatgccgtggtgaagttcctgagggtggtgccgagtcctaggaggagtgtggacatgtcaatgtctagtgtgtgtgtttgtgagtgggtgggaatactatggtggcacctgtgggaaaagggcgtctgtcatgggagtttctctccgctaagttttcagtccacagttgccctcggagaagacctggaatcacaggacaatgggcagtgtgacagcctgtgtacaggagagcagagcctcccattcccagacacccagagttttattccaggccaggcctccatgatatctttttttctggcaccaaatctgtagcatttgctgaacatcaaacaattctccaacaccaacttacggtctaacatttgaattctgacaccacccacagtcagtacagaccctgattcagggctcggtcccacaacattgtcctcaatgcagatgccagtcataaaccccatgggcccatgtatgtgtctgagctactgtttaaaaacgggagacggccgggcgcggtggctcacgcctgtaatcccagcactttgggaggccgagacgggcggatcacgaggtcaggagatcgagaccatcctggctaacacggtgaaaccccgtctctactaaaaatacaaaaattagccgggcatggtggcgcgcgcctgtagtcccagctacacgggaggctgaggcaggagaatggcgtgaacccgggaggcggagcttgcagtgagtcgagatcgcgccactgcactccagcctgggcgacagagcgaaactccgtctcaaaaaaaaaaaaaataaaaataaaaaaaaataaaaataaaaacgggagactcccataacgtccctgaagttcaataatttcatagagctactcacagaactcagcaggaaactgtagttacctttaccggtttaatatataagatgaaggccaggaaaagtcaaatggaaaaaatgcacagaacaaataaaagagatggaaaaagatgaaacacataatcctaaaaaatatttgtgattaataaaatcatcctaggtcgggcgcggtggctcacgcttgtaatcccagcactttggggggccgaggcgggcggatcacaaggtcaggagattgagaccatcctggctaacacggtgaaaccctgtctctactaaaaatacaaaaaattagcggggcatggtggcaagcgcctgtagtcccagctactcaagaggctgaggcaggagaatggcttgaacccaggaggcggagcttgcagtgagccgagatggtgccactgcactccagcctgggcgacagagcgagactctgtctcaaaaaaataaataaataaataaataaataatttaaaatgtctccatcctttgtgtgctccaggaacagtttatggaaggaaacacccttcccattatgacttaagtggtgctctcttttctttcctaaaacacaggctgacacacacactgcacattttctccttttttttttttgagatggagtctctctctgtcgctgaggctggagtgcagtggcgcgatctcggttttctgcaagcgctgcctcccaggttcacgccgttctcctgcctcagcctccggagtagctgggactacaggcgcccaacaccacacccagctaacttttttttttttttgtatttttagtgaagacggggtttcaccctgttagccaggatggtctcgatctcctgacctcgtgatccgcccgcctcggcctcccaaagtgcggggattacaggcgtgagccaccgcgccgagcctggaattcatttttttttttaaacataaatctaatgtttttattttacaaagtttagaaattgcctcaaaacaataaaaacttcatcatcagtaagacctccccagtttcctttcatcttaaccttaactgcatctgcctgtgggatcccagctttccagggctctgtagcttctctcaggataaaggcttcttctatggctggggtgagcaggctgagacagctgcatgggtggctcctcagaaagaactaactgggcctttaataacttcctcttgcatgcttaatattagccctagcttggagttactaggttcaagctttaatttccatgtcagagttattcacttggttttcaaaactaagtgtttgaaaaatccagtgaaattactcacagcgtttacataagaaaaggaaattttaaggtgcttacttttttttttttttttttgagatggaatctcgctctgtcacccacactggaatgcaatggctggatctcagctcactgcaacctccacctcctgggtaaaagctattcttctgcctcaccctcccaagtaggtgggactacaggcatgctccaccacacccagctaatttttgtatttttagtagagacagggtttcaccatgttgggcaggcgggtctcaaactcctgacctcaaggaatcaacccgcattggcctcccaatgtgctggaattacaggcgtgagctactgcacctggctaaggtgcttgcattttatgcctccataagaaaaacaaatatatctacttctttcagacaatatatgtattattttattatttatattaaaaaataatgtagtaaaaaattagtcatatgggaatgcttctaaaagttaccacgtttcatcacatgcaatttagcactaaactcagaaatcaagacaacaggatatagaatggagatattcactgtcacaaatttaccctgcaaaaagaggaactgatgttttgatgaatctgtgtaactcattcaccacattttcctatgaaaatatattcattgtctagagccaaaatggaagagagattttccctattttttcccttggtagctagcattataaagctaaggcttagaattctgtctgaaatcactaagacataaaaaccacacccaagaaaattcctaaactcactcttggaaagaaaaatgtaaatgagttattaacaaatggaatatatgattaaatattaattttttgaaactcatcttttattttctttgtaaatattttcttacctttcaagccctactaataaaatgcaaattacagataaaaaactgattcaggtgggtgctgtggctcactttaatgccagcactttgggaggccaaggcaggcagatcaattaagattaaaagtttgagtggggcacggtggctcatgcctgtaatcctagcactttgggaggcctaggtgggcggatcacctgaggttgggagttcgaggccagcctgaccaacatggagaaaccccatatctactgaaaatataaaaattagctgggcatggtggcacatgcccaaggctgaggcaggagaatctgggaggctgaacctgggaggcagaggttgtggtgagccaagatcacgtcatcgcactccagcctgggcaacaagagcaaaaatccatctcaaaaaaaaaaaaaaaatgactaaaagtttgggaccagcctggtccatctctactaaaaatacaaaaactagccaaatacagtggtgcacacgtgtagtcctagctactccggaggctgaggcatgagaatcacttgaacccagaaggtagaggttgcagtgtgccaagatcaagtcactgcattccaacctgtgcaacagagtcagactgtcttaaaaaaaaaaaaaaaaaggcagaatcaacaacaacaacaaaaacacctgaggtcaaaataagtgaacaaatctttcaaggtagatatccaatcactcaccccatcctgttcacatgctcaataaccaccctcccaggagacacagcgcagacacagcgtgactgccccagctgcattttactatgtaagtttttaccccatctcactggggtcattttcttttgtcttttgaaggtttttttcacaaactttttactatttttctttcactccccccaagagcatccagggggcagaaattatttgttttcccctcaataccagcatctgattggctcaccaacaatgtgtctccaagaaatggaagttaggttgggtcaagacaatcttcatgtctcaaggggctagcttttcaaaaaaaaaaaaaaaagtatatcaggagatgcctttcagccccaaggctgccacctgctcccttgagaggctacactctatacttcaggtggtcctaagggagaaagtgacccaagagctaatatccattagacattttagcagacatagccatagtgggtatcttggtttatctccagaaagtactaaaacccaggcccagaataaaactgaaggttagcagaggtcacatcaccctataatgtttccagagggtaatgttaacctaaaaacattctggtaagttctctggaaaaataaaagaaaaaaaggtacagatattttttacaatacagtgtcaggggattattctttgctttcttctcatgggaaatatttaaaaatagaaaacaaatcttttcaatagtgctatgcaatgctttaaacaatgattgaggaacgtggggtacaggaggccctgctggggacacatgtgaaaaatgccagagaaaatcagccccttgtgggttgtgaaaataattaagcggcaggcaattagactgagaaggctctagtcctcagattcctacttgtaaaaaaatgtaaactcaagttgatttgttaataaattactacatttggggaaacaaatttcaggcttaaacaactataaactgccaaataagctctgattacataaccaggaaatttccaccttgattatacaaattaagaagctacgtaagtacacctaaccaattgttgaatttggttttcttcatcactgattttacaaatgtctttccttcaagcccctcccatggaccacagactacaaactataactgggtgctctacaattcttgaatcactctttgattaaattacttgattttttgcagtgactcccataattttttttttttttgtaaaggacatatcatatttattcatacacatgctggaattattggtgcagacatttaaatacattttctttgagaaagtccttttttttttttttttggatggagtttccctcttgttgcccaggctggagtgcaatggtgcaatctcagctcacaacaacctctgcctcctgggttcaagcaattctcctgcctcagcctcccaagtagctgggattacaggcatgcaccaccacgcccagctaattttttttatttttagtagagacggggtttctccgtgttggtcaggctggtcttgaactcctgatctcaggtgatctgcccgccttggcctgccacagtgctgggattacagtcgtgagccaccacagctggcctgggaaactccattctttttttttttttttttttttaaatttatttttttattgataattcttgggtgtttctcacagagggggatttggcagggtcatgggacaatagtggagggaaggtcagcagataaacaagtgaacaaaggtctctggttttcctaggcagaggaccctgcggccttccgcagtgtttgtgtccctgggtacttgagattagggagtggtgatgactcttaacgagcatgctgccttcaagcatctgtttaacaaagcacatcttgcaccgcccttaatccatttaaccctgagtggacacagcacatgtttcagagagcacagggttgggggtaaggtcacagatcaacaggatcccaaggcagaggaatttttcttagtgcagaacaaaattaaaagtctcccatgtctacttctttctacacagacacggcaaccatccgatttctcaatcttttccccacctttcccgcctttctattccacaaagccgccattgtcatcctggcccgttctcaatgagctgttgggtacacctcccagacggggtggtggccgggcagaggggctcctcacttcccagtaggggcggccgggcagaggcgcccctcacctcccggacggggcggctggccgggcaggggggctgaccccccccacctccctcccggacggggcggctggccgggcggggggctgaccccccaacctccctcccggacggggcggctggccgggcggggggctgacccccccacctccctcccggacgggcggctggccgggcagaggcgcccctcacctcccggacggggcggctggccgggcggggggccgacccccccacctccctcccggacggggcggctggccgggcagaggggctcctcacttcccagtaggggcggccgggcagaggcgcccctcacctcccagacggggcggctggccgggcggagggctgatccccccacctccctcccggacagggcggctggccgggcggggggctgacccccccacctccctcccggacggggcggctggccgggcagaggggctcctcacttcccagtaggggcggctgggcagaggcgcccctcacctcccagacgggacggctggccgggcggagggctgacccccccacctccctcccggacggggcggctggccaggcggggggctgacccccctacctccctaccggacggggcggctggccgggtgggggggctgacccccccacctccctcccggatggcacggctggccaggcggggggctgacccccccacctccctcccggatggcacggctggccgggcgtgggggctgaccccccacctccctcccggatggggcggctggccgggcggggggctgacccccccccccccacctccttcccggacggggtggctgccgggcggagacgctcctcacttcccagatggggtggctgccgggcggagaggctcctcacttctcagacggggcagctgccgggcggaggggctcctcacttctcagacggggtggttgccaggcagagggtctcctcacttctcagacggggcggccgggcagagacgctcctcacctcccagacggggtctcggccgggcagaggcgctcctcacatcccagatggggcggcggggcagaggcgctccccacatctcagacgatgggcggccgggcagagacgctcctcacttcctagatgtgatggcggctgggaagaggcgctcctcacttcctagatgggatggcggccgggcgtagacgctcctcactttccagactgggcagccaggcagaggggctcctcacatcccagacgatgggcggccaggcagagacactcctcacttcccagacggggtggcagccgggcagaggctgcaatctcggcactttgggaggccaaggcaggcagctgctccttgccctcgggccccgcggggcccgtccgctcctccagccgctgcctcccgggcggcgctcgccggcgccgactcccataatttactttttctagacagagtctttctctgtcgcccaggctggagggaagtggcatgacctcagctcactgaaacctactccttccgggttcaagcgattctcacctctgcctttggagtagctgggactacagacattcaccatcacacccagccaatttatgtatttttagtagagatggggtttccccattttggccaggcttatcttgaactcctgacctcaagtgatccacccgcctcggcctcccaaagtgctgggattacagacgtgagccaccgcgccaggccccataaattttttcttttccttctttcttttttttttgagacagagtctcgctctgttgccaggctggaatgcagtagcacgatcttgtcttactgcaacttccgcctcccaggttcaagcgaattctcctgcctcagcctcctaggtagctgggactacaggcccccgccgctatgtttggctaatttttgtgttttagtagagacagggtttcaccatgttggccaggatggtctcgatctcttgactttgtgatccacccgcctcggcctcccaaagtgctaggattacaggcatgagccaccacacctggccacccgtccccataaatttttaataagagaaaacagaaactgtgaaccccacagaccaaagctcttcccattcatgaacccacaccccgagtcagggttcccccccaaagatcctcctggagtccccgcacaatctaggagagacgtggcactgtgggtgcagggctgccctgagaaggtttcaggccagggcacagtcaccgcgcagggaagagacaggacacccctggaccgcctgtcagcgcagctgccatcttagggctgaaggggactgaggccgagctgggcaaggagaacttgtggcacagattgtggagctgactgaggagaggcctgagtcctgccactgccacttgtcaccggttccaaccatcccctcccgctcactcaggatgtcggaccggcactctcactgtttctaggcttccaggaggtcctggtgtcttagctgtggatctcccaatacctgcaggtcacagggctatagaggttgcgcctctaggagcagaggacacagactagtgaagaggagacccagagctcaggctgcagccagagacaaaggctgcagccaaacactgaagacgtcctgttcactccagctgcgtgcctgattgggcagttttcaggccagcgtttcttttttcttttttttttttattgatcattcttgggtgtttctcgcaaagggggatttggcagggtcataggacaatagtggagggaaggtcagcagataaacaagtgaacaaaggtctctggttttcctaggcagaggaccctgcggccttccgcagtgtttgtgtccctgggtacttgagattagggagtggtgatgactcttaacgagcatgctgccttcaagcatctgtttaacaaagcacatcttgcaccgcccttaatccatttaaccctgagtggacacagcacatgtttcagagagcacagggttgggggtaaggtcataggtcaacaggatcccaaggcagaagaatttttcttagtacagaacaaaatgaagtctcccatgtctacctctttctacacagacacagcaaccatccgatttctcaatcttttccccacctttcccccttttctattccacaaaactgccattgtcatcatggcccgttctcaatgagctgttgggtacacctcccagacggggtggtggccgggcagaggggctcctcacttcccagtaggggcggccgggcagaggcaccccccacctcccggacggggcggctggctgggcggggggctgacccccccacctccctcccggacggggcgtcagcccagcgtttctgattggataatgcttaaggcccccgccccctcaggccctgagtaacagaaaatgtgatcaggactgagtgaagaaaaagtcacagcctaagctgcagcgtttttcaggcagggcttcctccctgagctgagccaggcccaacccagatcatgggaaaattctatctttttttttactctctctctttttgaatatattcaaaaggtgaacagaagtattttgctgtcatattaataatacataaaatttttttcaagagaaaatcagcttttactttggtaatagtgtattatcaatactaaagctaattttaataaaccttataaataaatcaaatttgtcatttttgaccactccggttttacatgtatattttgtaatctcttgtaatttttaaaaactgtttacattttatttttatccaaattctttttattttttcaatttgaaaccacctttaagtaatttcaaattgttataggagatagaaagaagtcatttagggccaggttcactggcaagtgcctgtaatcgcaacactttgggaggccaaggtgggtggatcacttgaggtcaggagttcaagaccagcctggccaacatggtgaaaccccatttctactaaaagtacaaataactagctgggtgtggtgctgcacacctgtagacccagctagtccggaggctgaggcaggagaattgcttaaacccagaaggcggaggttgtgtaactgcccaaggggttcaccttgccctatgtctagacagagctgattcatcaagactgggtaatttgtggaggaaaagttaaatactaaatttgaacttaattgaacgtggacaaactcagtagtcaccaagttctcaaacaggttgtgtgaggcccttgaggcattcattcagcgctgtttcagagaaatctctatttcaatctatttctatatattagttgttgaaaaacaatagacaatcgcaaaaacaagttgacagttttgtgttccttgaccccagttgcaaatggccctcatgactgggccttatgccaaacaactcgttacaaaagagctagggtatcagattgtgctgaagcttcattagaccctcctcatctgtgcaggaatgagtagctgactctggagcccaagctgttgcttcccagtctggtggtgaatcctccatagtctggtgagtgtaaatatatatatctcttttcctttctcctcttcccattgcaatttgcttattatatcaacatgcttattatatcaatctggttattacattgatttgcttattatataatttgctaattatatctgcatttccatttacgtggcacaaagcttatttacccttaaaggtattgtgtgtgtgtcttttcttctccccttgaatgtttcccacacagaatatttttggcgtcacgaacaggattcaaaaaccaaactgtgccactttttggccacaaggacagggctggaaactcgaggaaatcccaaatccagggatgggaactccccaatatcactgtcaattcctacaggattgaacgaaggggacgaatgcagaaatgaagacaaagacaaaagatttgttttaaaagaaggggtcaggcagggcgcagtggctcaggcctgtaatcccagcactttgagaggccgaggtgggtggatcgcgaggtcaggagagcgaaaccatcttggctaacacggtgaaaccccgtctctactaaaaatacaaaaaaatttagccaggtgtggtggcagacacctgtagtcccagctacctgggggggtgggggggtggggctgaggcaggagaatggcatgaacccaggaggcagagcttgcagtaagccaagatcgtgccactgcactccagcctgggtgacagagcgagattcggtctcagaaaaaaaaaaaaaaagaaggtatcaggggctccttgcttctagtgagcagaaggcagccctgtttctacaggccttagtatttattaggtagaatcaatagggagggagaggtaatggttggtcagctgcttgatttatcacaggtacatataattgctttctttgtacaacaggcttcagatattcctatagataaccacaaggaacactgcgcctggggcataactgccctcagcacccgttctggcagcagatgcagtttgtcagttttccaacatcctgctttcatgagaagagttttcccatatagcctctgtcaggcctctgagcccaagccaaatgaaatttggtgccatgactcggctcgggggacctcccttgggagatcaatcccctgtcctcctgttctttgctccgtgagaatgacccacctgtgacctcaggtcctcagaccgaccagcccaagaaacatctcaccaatttcaaatccggtaagcggcctctttttactctcttctccaacctccctcactatccctcaacctctttctcctttcaatcttggcgccacacttcaatctctcccttctcttaatttcaattcctttcattttctggtagagacaaaggagacacgttttatccatggacccaactccggcaccggtcatggactgggaaggcagccttcccttggtgtttaatcattgcagggacacctctctgattatacactcacgtttcaagggtgtcagaccacacagggacacctgccttggtccttcacccttagcggcaagtcccgattttctgaggaagggacaagtacccctcaaccccttctctccttgtctctaccccttctctgcttttctggggcaggggcaagaacccctcaaccctttctccttcacccttagcggcaagtcccgctttcctggggcaggggcaagtacccctcaaccccttctccttcacccttagtggcaagtcctgctttcctagggggcaagaaccccccaatcgcttatttccataccctaacctcttatctctgtgccccaatcccttatttctgcaccctgacctcttatctctgtgccccaatcccttatttctgtgccccaacaccttctctgcttttctggagggcaagaaccctccaccccttctccgtgtctctactcttttctctgggcttgcctccttcactatgggtaagcttccaccttccattcctccttcttctcccttagcctgtgttctcaaaaacttaaaatctcttcaactcacacctgacctaaaacctaaatgccttttcttctgcaatgccacttgaccccaatacaaactcgacagtagttccaaatagccagaaaatggcactttgaattttttcatcctgcaaaatctaaataattcttgtcgtaaaataggcaaatggtctgaggtgcctgatgtccaggcattcttttacacatcaatcccttcctagtctctgtgcccagtgcaactcgtcccaaatcttccttctttctctcccacctatcccctcagtaccaaccccaagcatcactgattctttctaatcttccttttctacagacccatctgacctctctcttcctccccaggctgctcctcaccaggccgagctaggtcccaattcttcctcagcctccgctcctccaccctataatctttttatcacctcccctgtaggggtgggttgcccctccacacctgtgggtgtttctcataaggtggaacaagagacttaggaaagaaaaagacacaaagtatagagaaagaaataaggggacccggggaaccagcgttcagcatatggaggatccccccagcctctgagttcccttagtatttattcatcattcgtgggtgtttctccaagagggggatgtgtcagggtcacaagacaattgtggggagagggtcagccgacaaacacgtgaacaaaggtctttgcatcatagacaaggtaaaggattaagtgctgtgcttttagatatgcatacacataaacatctcaatgctttacaaagcagtattgctgcccgcatgtcccacctccagccctaaggtggtttttccctatctcagtagatggaacatacaatcgggttttataccgagacattccattgcccagggacgggcaggagacagatgccttcctcttgtctcaactgcaagaggcatgccttcctcttatactaatcctcctcagcacagaccctttacgggtgtcggggtgtcgggcggggggacagtcaggtctttcccttcccatgaggccatatttcagactatcacatggggagaaaccttggacaatacctggctttcctaggcagaggtccctgcggccttccgcagtgtttgtgtccctgggtacttgagattagggagtggtgatgactcttaacgagcatgctgccttcaagcatctgtttaacaaagcacatcttgcactgcccttaatccatttaaccctgagtttgacacagcacatgtttcagagagcacggggttgggggtaaggtcacagaatctcaaggcagaagaatttttcttagtacataacaaaatggagtctcccatgtctatttctttctacacagacacagtgacaatctgatctctcttgcttttccccacatcccctcctcacacctggtccggcttacagtttcgttctgtcccccacctgcccagcaatttactcttaaaaaggtggctggagccaaaggcatagtcaaggttaatgctcctttttctttatcccaaatcggatagcgtttaggctctttttcatcaaatataaaaacccagcccagttcatgacttgtttggcagcaaccctgagacactttacagccctagaccctaaaaagtcaaaaggccgtcttattctcaaaatattttattacccaatctgctcccgacattaaataaaactccaaaaattaaattccggccctcaaaccccacaacaggatttaattaacctcgccttgaaggtgtacaataatagaaaaaaattgcaattccttgcctccactgtgagacaaaccccagccacatctccagcacacaagaacttccaaacacctgaaccacagtggccaggcgttcctccagaacctcctcccacaggagcttgctacacgtgccggaaatctggccactgggccaaggaatgcccgctgcccaggattcctcctaagctgcgtcccatctgtgtgggaccccactgaaaatcggactgttcgactcacctggcagccactcccagagcccctggaactctggcccaaggctctctgactgactccttcccagatcttctcagcttagcggctgaagactgacactgcccgaacgcctcggaagccccctagaccatcacggatgctgagcttccggtaactttcacagtggaaggtaaacccatccccttcttaatcaatacagaggctacccactccacattaccttcttttcaagggcctgtttcccttgcctccataactgttgcgggtattgatggccaggcttctaaacctcttaaaactccccaactctggtgccaacttagacaatactcttttaagtactcctttttagttatccccacctgcccagttcccttattaggctgagacactttaactaaattatctgcttccctgcctattcctggactacaactatatctcattgctgcccttcttcccaatccaaagcctcctttgcatcctcctcttgtatccccccaccttaactcacaaatataagatacctctactccctccttggtgaccgatcatgtaccccttaccatctcattaaaacctaatcacccttaccccactcaatgacaatatcccatcccgcagcaggctttaaaaagattaaagcctgttatcactcgcctgctacagcatggccttttaaagcctataaactcttcttacaattcccccattttacctgtcctaaaaccagataagacttacaatttagttcaggatctgcgccttatcaaccaaattgttttgcctatccaccccgtggtgccaaacccatatactctcctatcctcaatacctgcctctacaacccattattctgttctagatctcaaacatgctttctttactattcctttgcacccttaatcccagcctctcttcgctttcacttggactgaccctgacacccatcaagctcagcaaattacctaggctgtactgccgcaaagcttcacagacagcccccattacttcaatcaagcccaaatttcttcctcatctgttacctatctcggcatttctcataaaaacccacatgctctccctgccaatcgtgtccaactgatctctcaaacccaagcaccttctacaaaacaacaactactttccttcctaggtatggttagcatggtcagaattcttacacaagagccaggaccacaacttgtagcctttctgtccaaacaacttgaccttactgttttagcctagccctcatgtctgcgtgcagcagctgctgctgctttaatacttttagaggccctcaaaatcacaaactgtgctcaactctctctctacagttctcataacttccaaaatctattttcttcctcatacctgatgtatatactttctgcttcccggctccttcagctttactcactctttgttgcatctcccacaattaccattgttcctggcccagacttcaatccagcctcccacattattcctggtaccacacctgacccccatgactgtatctctctgatccacctgacattcacatttccccaaacttccttctttcctgttcctcaccctgatcacacttgatttattgatggcggttacaccaggcctaatcgccacacaccagcaaaggcaggtgatgctatagtacaagccactagcttgcctcttagaacctctcatttccttcccattgtggaaatctatcctcaaggaaataacttctcagtgttccatctgctattctactactcctcagggattattcaggccccctcccttccctacacatcaagctcgaggatttgccccacccaggactggcaaattagctttactcaacatgacctgagtcaggtaactaaaacacctcttagtctaggtagacactttcactggataggtacaggcctttcctacagggtctgagaaggccaccacagtcatttcttccattctgttagatataattcctcagtttagccttcccgcctctatacagtctgataacagatgagcctttattagtcaaatcagccaagcagtttttcaggctcttagtattcagtgaaacctttatatcccttatggtcctccatcttcaagaaaagtagaatggactaaaggtcttttaaaaacacacctcaccaagctcagccaccaacttaaaaaggactggacaatacttttaccactttcccttctcagaattcaggcctgtcctcagaatgctacagggtacagcccatttaagctcctgtatagacgctcctttttattaggccccagtctcattccagacaccagaccaacttagactgtgcccccgaaaaacttgtcatccctactatcttctgtctagtcatactcctattcacctttctcaactactcatacatgccctgctcttgtttacactgccagtttacactgtttttccaagccatcacagctgatatctcctggtgctatccccaaactgccactcttaactcttgaagtaaataaataatctttgctggcaggactatgctgaatctccttaggcattctctaatcagatatcctgagtcatcccaattcttagaccttttatacctgtttttctccttctgttattccatttagtttctcaattcatccaaaaccatatccaggccatcaccaatcattctatacgacaaatgtttcttctaacaaccccacaatatcaccccttaccacaagacctcccttcagcttaatctctcccactctaggttcccacgccgccccaatcccgcttgaagcagccctgagaaacatcgcccattctctctccatatcaccccccaaaaattttcaccgccccaacacttcaacaccattttgttttatttttcttattaatataagaaggcaggaatgtcaggcctctgagcccaagccaagccatcgcatcccctgtgacttgcatgtatatgcccagatggcctgaagtaactgaaaaatcacaaaagaagtgaatatgccctgccccaccttaactgatgacattccaccacaaaagaagtgtaaatggcctgtccttgctttaagtgatgacattaccttgtgaaagtcattttcctggctcatcctggctcaaaaagcacccccactgagcaccttgcgacccccactcttgcccgccagagaacaaaccccctttgactggaattttcctttatctacccaaatcctataaaacggccccacccttatctcccttcactgactctcttttcagactcagcccacctgcacccaggtgaaataaacagccatgttgctcacacaaagcctgtttggtggtctcttcacacggatgtgcatgaaagcctccagtggtatactgagttggtcaggacccccattttctctgcgtccaacatccccagttctcctctttggtgattgagtggttcagggaaactggcctttgtaagaactgagaatctaaattaatgcaatttaaacctttgactgtgtatgtgagaggagagaaagaccctctcacattgttttatattgttttatattcagtaaaaacaacaaggaagtaaaaccaaagacaggcagcctggcgccaggcctgaaaccaggcctgggcccacctggcctaaacccagtagttaaaaatcaacttatgatttagaagctgatgttattcatagattccttacattgtatagaagaacacggtgaaactccctgccctgttctgttcctccctgaccaccggtgcatgcagcccctgtcatgtaccccttgcttgctcacatcaatcacgaccctttcatgtgaaatctttagtgttgtgagcccttaaaagggcagaaattgtgcactcagggagctcagattttgagacagtagctggccgatgctcccagctgaataaagcccttccttctacaactcggtgtctgagagattttgtctgcggctcatcctgctacatgtgaagtgcagcaggggattccagtcagcaaaggagatgctgaaggatctccccgagtgaatggtgtttgcttactctttataagttaatgtatcaggataggggatagttgctacaagagaaataagagctggaaaagaaaaatgccaatccaactgccagactgaccctggcccaatgccaggcctatgtcttaactgttcagactcaaagatatcagcctattgatgaaaaaagtggctgtcccaatggccccatcagggtaaaattgaagaactagtcagtcaggtcttggagcaggtaaaaacacagctcctatctcaaggatgggaaattaaccttagtaaaattcaaggacaaattgtaaaattccttggcatcctgcacaaactataaaattccttggcatcctatgaaatgcagggaaatagtccattttaccaaagactaaggctaaaatactaaaaattgcaacccttaccactaaaaaggaggactagaaatttattggcttgtttggattcgggagacattatattcaccacttgggtaacattttacaacctctgcatgcagtcactagaaaatgctgtgactttcactggggagagaaagagagcatggcttttgaacaagctaaacaagcagtgcaactggccctggacctatggcccatatgagatgggccagtagaactgcaaataactgtcctaaatcaacatgctaattggagccttaggcagaaacaagatgggaagagggtacactttgggttttgaacccagaaattgccagaggccagcaaagcttatacccctttcaagaagcaattgttaccttgctattgggctttgctggaaatggaacacctctgcttcaaccgtgatgtctttataaggtctgaaattcctattatgacttgagtcatgagttcccccaaaactcaccaaatagggcatgcccaagaaagtaacatcataaaatggaaatacaacatagaagaccaggctaagccaaaaccaaagggggtatcatttttacatgaggatgtacaaaacttgccagctcaggaaaccactgaggaagtgctgcacatagggaaggaaaccgcccctccccccactcaatggtgcagttcctttaaagaactaagcccagaggatcagaaacatgcttggtttactgatcgatccagcaaacatattggtgggacccaatgctggaagggcatggcttataatcctgttaaaaacgtaagcatttctgatgaaggaaggggtgggagcagccagttagctgaactagtagccaacctccaagatattcaggaggaagccagagggatttgtcacttgtataccaactcttggtcagtagcaaatggtcttactacctggatgctccaatagtgacaaaacaaatggttaattgggaataaagaggtttggggaaaaaaatactgagaagatatctgaatcctggtgcacactaccattgttgctgttttccatgttgatgctcatccatctctgctttctcttgacagactatttaatcaccaggaagatcaacaggccaaaatttttattataactgcaaacttgaatgcggatgaattgatttcctgttcaagccttgcaatgactggcattataatgtgtggtggtataattgatagtgattagtggcctaaatattccacttaaaagatacagaatggtagaatggagaagagtttaccaaccaaatatctgcggtctttaagagactcacccaacacataaaaactcacataaagttaaggtaaagggttgggaaaagatagtcatgcaaatgtaccccaaaagcaagcagtagtagccattcttacatcagacaaaacagacattaaagcaaaaacagttaaaaataaaaaaagacaaagagggacattatataatgataaaaggactagtccaacaggaaaatatcacaattctaaatatatatgcacctaacactggagctcccagtttattaaacaattactactagacctaagaaatgagataaatggcaacacaataataatggggaacttcaatactctactgacagcactagacaagtcatcatgacagaaagtcaacaacaacaacaacaacaaaaacaatggacttaaactataccgtagaacaaatggacttgacaaatatttacagaacattccacacaacaactgcagaatatacatttcattcatcagcatatgaatcattccctaagacagacatatgatgggccacaaaacaagtctcgataaatttaagacaatcaaaattatatcaactactctgtcagactacagtggaataaaagtgaaaactccaagtgaaccctcaaaaccatgcaaatccatggaaattaaataaatacatggaaattaaataaaaataaaatttaggatcaacttgtttctgaatgattgttgtatgaaatcaagatggaaatttaaaaattctttgagctgaacgataataatgacaatctattaaaatgtctgggatacagcaaaagtcgtgctaaaaggaaagttcatagcatcaagtgcctactaaaaagtctgaaagctcataagtagacaatctaagataacacctcaaggaactagagaaacaagaacaagccaaacccaaacccagtagaaaaaaagaaataacaaagatcagagcagaaccctagggggaggggtggctgcagtctctgtggaccagcagacttagcctttcctcctgctagttttgaagaatttgagcagcccagatgagtggattttcccccagtgaaacacccccctccaccaaaggacagtcaaagtgcttcattaaatgagttctgcttcctgtgccacccaactggatgagacccttcaacagggattgtcagacaccctatagaggagcaattctactggcatcaggtttgtgcctcttgaggtcagagatcccagaggaaggagcgggcactcttctttgctgttctccaacttccttgagtgacatctccaggcacggcggtgaaccagatgaataggtcctgaagttagcccctagcaaactgcagcagcgctacagaagatggacctgaccattgaaagaaaaacaaacagaaagcaacaatgcatcaacaagaaaaaaatgtacccacaaaaacctcatccaaagccacacatggtggctcacacctgtaacccaatactttgggaggccgaggcagtgggcagagcacttgaggtcacgagttcgagactagcctggccaacatggtgaaaccttgtctctactaaaaaatacaaaaaaaaatagccaggcgtggtggtgcatgcctgtagtcccagctactaggtagtctgagacatgagaatcacttgaacctgggaggcagaatttgcagtgagctgcgattgtgccactgcactccagcctgagtgacagagagagagactgttaaaaaaaaaaaatccaagtgtcagaagcctcaaagatcgaaactagacaaactcatgaagatgagaaagaatcaacaaaaaacagctgaaaggccagagtgcctcttctcttccaaatgatcaaaatgtctcttcagcaaggtgcagaactggacagaagatgagatgcatgaattgatagaagtaggcttcagaagatggttaataacaaactctgctgagctaaagaaacatgttcaaacccaatttgaagaagctaagaacctcgataaaaggttagaggaactgttaactagaataaccagtttggagaggaacataagaggatgagatgcatgaattcacagaagtaggcttcagaagacggttaataacaaactctgctgagctaaagaaacatgtttgaacccaatttgaagaagctaagaaccttgataaaaggttagaggaactgctaactagaataaccagtttggagaggaacataagaggatgagatgcatgaattcacagaagtaggcctcagaagatggttaataacaaactctgctgagctaaagaaacatgttcgaacccaatttgaagaagctaagaaccttgataaaaggttagaggaactgctaactagaataaacagtttggagaggaacataaatgacctgatggagctgaaatgtttggcatgaggcccagtcactagggccctttgcgactgggctcaaggaacacaaaaacgttatcttgtttttcaataactaacatataggaatagattgaaacagagatttctctgaaatgacactacatgaatgcctcaatgaatgcctcaagggggtcacacaaccggttctgagacttggtgaccattgtttgtgtctgtgttcaatttatttcaaaattaatatttaacttttcctccacaaattcccctgtcttgatgaatgggctctgtctaggcaaaaggcctgtctttatgaatcagctctgtctagacaaaaggcaaggtaaaacccttgggctgttacacaacctccgcctcctgggttcaagcgattctcttgcctcagcctccggagtagctgggactacaagtgcacaccagcacacccagataattttttgtatttttagtagaaatggggtttcaccatgttggccaggctggtcttgaactcctgactcaagttatccgcccaccttggcctcccaaagtgctggaattagaggcgtgagccactgcgcctggttctaaatgatttctatttcctgtaacaatttgaaattacttaaaggttgtttcaaattgaaaaaaagaatgtagataaaatataaaaagttaaaaaaattacaagtgattatgaaatatatgtgtaaatctcgagaggtcaaaagtgacaaatctgatttatatataaggttttattaaaattagctttagtattgataatacactattaccaaagtaaaagttgattttctaacaaaaattttatgtattattaatatgacagcaaaatacttctgttcaccttttgaatacatgcaaaaagagagagagtaaaaaagagatagaattttcccttgctctagggtgggcctggctcagctcagggaggaagccctgcctgaaaaggctgcagcttaggctgttactctttcatcactcagcccagcatctgatcacatcctctgtcactcagggactgagtgggcggggccttaagcattatccaatcagagacgctgggctggaaaccgtccaatcaggcaggcagctggagcaaagaggacggcttccgggtttggcgcggcctttgtctctcgctgcatctggagctctaggtcgcctcttcgctactctgtgtcctctgctcctagaggcccaccctctgtggccctgtgtcctgtaggtattgggagatccacagccaagatgccgggaccccttagaagcctagaaatggtgagagtgcccattggacatcctgagagaggggagggactggttgatgggaagtggctgtggagggactcaggcctccccgtagtcagctccacaatctgcgtccggacttctccttacccagctcggcctcagtccccttcagccataagatggtggctgcgctgacagccggtcccggggcgtcctgtctcttccctgcgcagtgaccgtgccctggcctggcgccctctctgtgcagcagctctccacccgcagcttcgggtctctcccagatggtgcgggaaccacgagaaggtcatcaggggagaatcttgactcggggtgcgggttcacgattcggaagagctttggtccgtggggttcacagtttctcttttcttttgttaaaaatttatggggccgggcgcggtggttgacgtctgtaatcccagcattttgggaggcgaaggctggcggatcacttgaggtaaagggttgctaggacaactaaattcctcttcaaagactcaacttcctgatcagaagttgtaaaagttgtaaaacaaccctacccctttttctcccttttccttttctcgcaaatcgctcgtttatcctatttggaaaaagtttgggtctaagccaaccgggatcagcttagattgtgcggtctgaccccagccaataggggaaggacacaaaaacaaaaactacgttggggttaaaaacccattcctggtcgggcgcggtggctcacgcctgtaatcccagcattttgagagacctaggcgggaggatcttgtggtcaggagttctagaccatcctggccaacaccgtgaaccccgtctctactaaaaatacaaaaattagccaggtgtggtggcaggcacctgtaatcccagctacttgggaggctgaggcacgagaattggttgaacccaggaggcggaggttgcagtgagctgagaccgcgccatcgtacttaagtgtgcgtgacagagcaagactccttcacacacacaaaagaagggccaggcgcagtggctcacgcctgtaatcccagcactttgggaggccaaggcaggcggatcacctgagttcgggagttcgagaccggcctgactaacatggagaaaccctgtctctattaaaaatacaaaattagctgggcttggtggcgcatgcctgtaatcccagctactcgggaggctgaggcaggagagttgcttgaacccgggaggaggaggttgcggtgagccgagatcgtgccattgcactccagcctgggcaacaacagcgaaactccgtctcaaaaaaaaaaaaaagtaagaatcttaaaattttcttcctttatgtaaacactgtttgagtaatttcactggatttttcaaacacttagtttcaaaaaccaagtgaataacactgacatggaaattaaagcttgaacctagtaattccaagctaaggctaatatgaagtctgcaaaaggagggggttaaaaaaaattttttttttttgagacagtcttgctttgtggcccaggctggagtgcagtggcgcgatctcggctcactgcaacctccgcctccggggttcaagcagttctcctgcctcagcctcccaagtagctgggactacaggcactcgccaccacgcccggctaatttttgtatttttagcagagacggggtttcaccatattggccaggctggtgtcgaactcctgaccttgtgatccgcctacctcagcctcccgaagtggtggggttactacattttttttattttgacatggagtttagctcttattacccagtctggagtgcaatggtatgatctcggctcaccgcatcctctacctcctgggttcaagggattttcctacctcagcctctggagttactgggattgcaggcacgcgccgtcacgcccggctaattatgtgtgtttactaggggtttctccatgttggtcaggctggtctctaactcccaacctcaggtgatccatccgccttggcctcccaaagtgctgggattacatgcttgcgccaccgcgcccggccaacaggaggttattaaaggcctagttagttttttctggggagcctcgcctgcagatgtcccagcctgctcaccccacccatggaaggagcctttatcctgagagaagctacggagccctggaaagctggagccccacaggtagttaagattaaggtgaaaggaaactgggagggtcttactgataataaagctattgttttgaggcactttttagactttttaagataaaaacgtcagatttatgtaaaaaaatgaattagtattggaacaggagaaagtaccaactaattataaggtctctgtggcttgcaaaaatgtaggcagaaaagggcttttttcctagggaggagcaaacgagattagaaaaaagcggggaggggaatgacaaatggagggtgaaaaagtcagattttagctcagagaatgtcttaccctgaaatcaccgtgttcttagaagggacataagatggggttgtatgttttttttttttttttttttttgagacagtctcactccgtcgcccaggctggagtgcagtggcgcgatctcggctcactgcaagctccgcctcccgggttcacgccattctcctgcctcagcctcccgagtagctgggactacaggcgcccgccaccacgcccggctaatttttttgtatttttagtagagacgggtttcaccgtgttagccaggatggtctcgatctcctgacctctgaccttgtgatccgcccgcctcggcctcccgaagtgctgggattacaggcgtgagccaccgcgcccggccaaaatggggtgtatgttgactcagactgagggtagctcaaaattcaggagcctgagggagggagataaataaagtttgattaagaaatattttattttaggccaggcgcgatggctcacgcttgtaatcctagcaccttgggaggctgaggcaggccgaacacctgaggtcacagcctggccaacacggtgaaaacatggtgtctactaaaaatacaaaaattagccaagcgtcttggcaggtacatgtaatgccagctacttgggaggctgaggcaggagaattgcttgaacctgggaggtgaaggttgcagtgagcagtgagtcaagatggtgccactgcactccagcctgggcagcagagtgagacttcatcacaagaaaaaaaaaagaaatttgaccactgaagacatattcagctgatttttctaatgagaaaaaggagaaaatgtgcagtgtatgtctggctgtgtgacaggtaagaaaagagagcaccatctaagtcataatgggaagggtgtttctgtccatcagctttttctggagtacacaacaaatggagaattttattaatcacaaatgttttccatgattatctatgtgtttcatctttcctcatgtcttttctttgttgtatgcatttcttccttttggcttttcctgggctgcatcttatatattaaaccggtaaacataactacagtgttttgttcagttctgtgaatagctctaccaaattattgaacttcaggaaggtttcaggagtcccgagttttcaaacattagttcaaaagaatagatgggcccatagggtttgtgactggcatctgcagtgaggacaatgttgtgggaccgagggtctatgctgactttaggtgctgtcagaattcaaatattaggcaataagtttgtgttggagaaatgtttgatgttcagcaaactctacagatatggtgccagtaaaaagatatcacagaggcctggcctggaacaaaactctgggtgtttgggattgggaggctccactctcctgtacacaggctgtcacactgcccattgtcctgtgattccaggtcttctcccagggtgacagaggactgaaaacttagagaaaaggagctctgattacagacccccttttattgcagctatcaccacggtgttcccacccactcacaaacacacacactagacattaacgtgtccacactcctcccaggactaggcatcaccctcagaaacttcaccacggcatttttgatcctagtgtttcttgtgtttcttgtcaagaacccacaagtctctacaagtctactggcatgtctccaccccagacactgaatctgcagcagcaacctgttttctccaccatcctaggatctgggccacatgtttataatttcatctgcctacatgcacacagaaataaatcagagtacagccccacctgggccactatctgtagtgaaaatcattccattcacctacattgcactctctcccacccaggaattattttttttcttttagcttttatttttggttcgatgtacacatgtgggtttgttatacagttaaaattatgtcatggggatttgttgtgcagattattttgtcactgaggtactacccatagcaccaaacaggtgtgttttctgatcctcttagtcctcacaccctccaccctcaactaggcctcagtgtctgttgttctcctctttgtgttcatgtgttcttattatttagctcttaataacatgcatttggttttctgtttctacgttagtttccttttttttttttcctttcattttgttttgtcttttgagctggacttttgctcttgttgtccaggctggagtgcaatggtgcaacctcggctcaccacaacctcaacttcctggttcaagtgattctcctgcctcagcctcccaagtagctgggattacaagcatgcaccaccatgtctagctaattttgtacttttagtagagacaggatttctccacgtgggtcaggctgatcataaagttccaacctcaggtgattacccggcctcagcctcccaaagtgttgggattacaggtgtgagccactgcacctagcttttgcctactttttttttttgagagagagttttgctcttgttgcccagactggattgcaatagcgtaatcttgaccaactgcaaccttcaccttcgagtgattctcctgcctcagcctcctgagtagctgggattacaggcacctgcaccactcccagctaattttttgtacttttagtagaaagggggtttcaccatgttggccaggctggttttgaactcctgtcctcaagtgttctgcctgccttggctttccaaagtgctgggattacatgcatgagccaccatgcccggcctgcctactttttaatgaggttgtttgtttttttcttgtaaacttgtttaagttctttttttttttttgtgagatggagtcgcttagactggagtgcagtggcactatctcggctcactgcaacctctgcctcctgggttggagtgattctcctgcctcagccttctgagtagctgggattacagacatgtgccaccaccacaccctgctaatttttgtatttttagtagagacgaggtttcaccctgttggtcaggctggtcttgaactcctgacctcgtgatacacccgccttggcctcccaaagtgctgggattacagtcatgagtcaccacgcccagccaagttcttaataaattctggatattaggcctttgtcagaggcaaagtttgtaaatatttttgtttattttgtagattgtttactctgttgatagtttcctttgctgtaaagaagctctgaagttcaaataggtctcatttgtcaatttttgcttttgttgcagttgctttgggtagcttcctcatgaagtctttgccagtttctgtgtctagaatggtatttcctaggttatcttgcagggtttctcataattttgttttacatttaagtctttaatttatcttgagttgatttttgcatatggtgtaacgaaggggtccagctttagtcttctaaaaaatgctggctagttattctagcaccatttattaaagagagaatccttcccacatttctcttgtcagctttgtcaaaaatctgatgattataggagggtgacattatttctgggctctctattctatttcattggtcttgtgcactcatggattttatataacatctttctctcttctggttttaaccccactaacgttctttcaagcgcatacagtatgcaaaactcaggtgtccaagagttcaaaactccttaaaaacttccaaaaaaaggccaggtgtggtggctcatgcctgtaatcccagcacttttggaggctgaggtgggtggatcacgaggtcaggagatagagatcatcctggctaacatagtgatacccatctctactaaaaatacaaaaaaaaattagtcaggcgtggtggcgggcgcctgtagtcccagctacttgggaggctgaggcaggagaatggcgtgaacatgggaggtggggcttgcagtgagctgagatagtgccactgcactccagcctgggggacagagcgagactccgtctcaaaaaaaaaaaaacttccaaaaaaatttttgccattgtctcatttcttaagggatttagattatatatagttatttttctctgatttttaaaaatatatgtaaattatattaacagctaaataccttttgtcttttttctgactccagattatctagaacttcagatttattgctttgtttttggttccaaaaagtttattttttaatttttagtcctttaaatagacacagatttatttagataaaagctaattttaagggcacacagaagcttagcacaaagataggatcaaatttagcaatacataatggtaaacattaaaagatactatgtttctttgacagaaaccagattatccaaggaaattatccaatatttgcaggctgaagtacttatactgcaaaaagaagaacagttcagtgcgtaaactgaacagtggagtctgtagttgtgcctggctttctatttattacttcagaataattagcatagttatgtgtaatgtttgtagacaagctgcatttatatacatttaacagtattttgtttttctttctttctttcttcttttttttttttgagagagtctctgttgcccaagctgcagtgcagtggcatgatctcatctcactgcaactgctgcctcccgggttcaagcgattctcctgcctcagccttccgagtagctgggattacaggcatgcatcactgttcctggctaagtttttgtatttatagtagagatggttgtcaccatgttcgccagtttgatcttgaacttttcacctcaggtgatccacccatttcagcttcccatagtgctaagattacaggtgtgagccataaacagtattttctaaaatagtatgaatataaagccacaatacttactttgaatgaatcacttaaatggttattttaatattgtaatttatacttttgaaatatagtgttttggctgaagtatagttttaattattaaaaatgctacatatattatgactagtgagtaaacacaattttagtgtcttttatttcattaaattggtatgctgctattacaggacaaataaagacatgtgatgtggccacccaaaaaccataatagctcttcagtttgctatgttgcaagttctaatatattccactatatgaacatagtcagattctatttcttcatcaaaaagtgttgttggaagttgtcagatgtatttcaatatagaacctccattcaatggctaggagatgacagaacagcagagatgggaaagaaactttataaaaattcttctgaaaatctgccacctttcttcataatgctcatgtttctcttgctgagagtagctgtgcgctttgggtgtttagagagaaattgcttttaggagaatattttctggcagacatgatcaattttatatctaatctgagctttttcctaatatcattttaacttttttctctccagtgctttgggtgtctgtttcagaagccctattaatttttttttttttttttttattgatcattcttgggtgtttctcgcagagggggatttggcagggtcataggacaacagtggagggaaggtcagcagataaacaagtgaacaaaggtctctggttttcctaggcagaggaccctgcggccttccgcagtgtttgtgtccctgggtacttgagattagggagtggtgatgactcttaatgagcatgctgccttcaagcatctgtttaacaaagcacatcttgcaccgcccttaatccatttaacactgagtggacacagcacatgtttcagagagcacagggttgggggtaaggtcagagatcaacaggatcccaaggcagaagaatttttcttagtacagaccaaaatgaaaagtctcccatgtctacttctttctacacagacacggcaaccatccgatttctcagtcttttccgcacctttcccccctttctattccacaaaacagccattgtcatcatggcccgttctcaatgagctgttgggtacacctcccagatggggtggtggccgggcagaggggctcctcacttcccagtaggggcggctgggcagaggcgcccctcacctcccggatggggcggctggccgggcaggggactgaccccacctccctcccggacggggcggctggcctggcgggggctgacccccacctccctcccggacggggtggctgccgggcggagatgctactcacttcccagatggggcggctgccaggcagagggtctcctcacctctcagatggggcggccaggcagagacgctcctcacctcccagacggggtcgcggctgggcagaggcgctcctcatatcccagacggggcagcggggcagaggcgctccccacatctcatacgatgggcggccgggcagagacgctccttgcttcctagatgggatggtggctgggaagaggtgctcgtcacttcctagatgggatggcggccgggcagagaccctcctcactttcagactgggcagccaggcagaggggcccctcacatcccagacgatgggcggccaggcagagacgctcctcacttcccagacggggtggcggccgggcagaggctgcaatctcggtactttgggaggccaaggcaggcggctgggaggtggaggttgtagccagctgagatcacgccactgcactccagcctgggcaacattgagcactgagtgaacgagactccgtctgcaatcccggcacctcaggaggccgaggctggcggatcactcgcggttaggagctggagaccagcccggccaacacagcgaaaccccgtctccaccaaaaaagtacgaaaaccagtcaggcgtggcggcgcgcacctgcaatcgcaggcactcggcaggctgaggcaggagaatcaggcagggaggttgcagtgagccgagatggcagcagtacagtccagcttcggctcggcatcagagggagactgtggggagagggagagggacagggagagggagagtcgaagccctattaattaatcccatgatttctgattaagctaggctgtcacagtgagaacttttggagctatctctatctggactcatgctggaaattcagcagtattttttccttgtcaccattataagtagaaactgaggttgaaacactgctctcattttcattattgtgaatgtgtaattctacccaggaggcctgcaggctctcctcctgcagctcaggcctcactctctgatgtgacactagagtgctgctgtggcaaatggggttcatataaaatgtgagctgtgctctgggctgtgcctcagtggcagatggtagaggtcaagagagcatactagcaaccaggagaaagcaagcaggagtgctgtagcccactgccagtgagtacagagccactcctctaaactgtaactagccaaaatatagaacactattcaaccatttttgtagcagagtgaaatcttagcttcagcaggtacctgacttcaagctgctaaaataactcctgttatgaagatgtgaaaagtttatttgtcattgaatataagcaattagcatacacagatggcctcttcaatttccaggtagatttaagatgaacgatgtatgacatggtgctttaaattcttctacttatggactaattatgttgaccatctttctgtcattgcagtctcttaagcagatggactatgatgcatgtcacattcaagtttaattgtaaaataaaaacgtttgttttttgagatggagtttcactcttattgcccaggctggagtgcaatggtgcgatctcagctcactaaccccgcctcccaggttcaagtgattctcctgccttagcctccctagtagctgggattgcaggcatgtgccaccatgcctggttaatttttgtattttttagtagagagggggtttgtcagtgttggccaggctggtctcaaactcttgacctcaggtgatccacccgcctcggcctcccaaagtgctgggattacaggcacgagccaccacacccagccaaaacgttttctttctgttctattattgtggagtttttctggggctgtaaacatttgttctttttttttgagacgaagtctctcatcccccaggctggagtgtgatggcgcaaacttggctcgctgcaacctctgcctcctgggttcaagagattctcctgcctcggccctttgagtagctgggattacaggtgcctgccaccaggcccggctaattttttttttgtatttttagtagagatgggttttaccatgttggccaggctggtctagaactcttgacctcaggtgatccacccgcctaggcctcccaaagtcctgggattatagacatgagccaccatgtccagcgaagaaaattgttcttctcttttttttctttttgagacaaagtctcactctgtcacccaggctggagtgtgctgtggtgccttctcggctcactgcaagctccacctcctgggttcatgccattctcctgcctcagcctcctgaatagctgggactacaggctcccaccaccacacctggctaattttttgtatttttagtagagatggggtttcactgtgttagttagatggtctcgatctcctgacctcatgatctgcctgtctcggcctcccaaagtgctgggattacaggtgtgagccaccgcgcctggccaaagaaaattgttcttctaattattgtttccaaacactgtctagaattaccagacatgatataaacacataaggtgccaaccagaatttagcaaggcctttccctgtcaggcttccagtcaattcacacttgtgcagcaaagtgcatgctgtcccctaaatatgcaggcagaattgtgtctctatttgttatctatagtcctgtacattcacttctagagaggctagatcagatttctacaaatttcatagggcagcaatcaatcattttatctctttcaatgactcctgtatcttcagacttgaaacagattcagagaccatggggcccacaaacccagttagagtaacatgtgtgcattgagtagacatgttgacaagagaatctccactttcaccttcctcctcttgctaaaatgctcacaaatgtgcaggtaacacctgctgctcctcctgccattcaggccctaaatctacagctctatattttgaatccagatcttgagatttgggaaataaaaaacttttgtctaaataaagcaggttcttttggttatcaaactcagagacatgttaaaatgaaagtgcagttatgtctttctcccactttgaacgatgtattcatctattgaaactgttcactattggcacaagtgactataaattaaactaatgatgccacattggacactatcccatgccctaaaacataatgatagatatctaatcaataatcaatgttatttatgtaaataaataaaaacttttgacaaacaactctgcatcagcccactttctgtccctgtcttgtcttgacatatcttcctgtaaatactactaatcaaagtgtagattccaggcaacttgaatctttgctcccaggttataacccttaagcttgacccaaataaactgtctacttatattcatgttatgtcaccttttttttaaatgtagacttattatttagaatgtgttagagcagcctctatgagagctctcttttgactgtactccacttggtgtaacacaaaaggatgcagagccaagttgatcctacctagaatttgcagataaggtctgccctctgcctgggatttaaaaaaaaaagccagactttggatagagaatgtacagaaaattaacaaaagtcattttctgcattgtaagttgtcaagatagatatcttacaggccccatttgggagtgtggcattttgagatttttcacatcttgttcattggcctgctacagtgatgtgagaggctccaggaggaaatagaatctgatggcagaatctgtaagtgtaaataatcatcttaggagtgagagatcaaggccacaaagtatccagagccttgatcacaactataattacctgtaaaatgtgatactggagtagagtatttttgtttctttctctcatccaagagctagcaaatcaggacagatgatgtaggttctggagctccaccaaggcagttgttttctattcagaatcagcctgagtttctccagatggcttatcattgggccaacagccctggttcaccaggaattccctcacaatcacctaggtgtctttgaggcatttgaggatgtccagagcagaattgtgttaggctgacaagagtggttaattctgcttctgtctcagtgtaagagaaatgagtcatcctgtgttcattcatgccctcatacaagaggtgccttttttggtacccagatcagagtttctccagtttcctggtacttggatgataaacaaggaggagatctggagacccaaatagataaactagttgcttccatttcatatggccattaaaaaaatacgtgaagcagtcatggttcctacagtccagaaacttttagtctagaccagcaactggataaataattgaattgtgcattgtatggttggcacaatatatagatgtgtccagaaccttgggttttatttaggccactttatgccgttatgacttctgaattgtacacctgaagggatatttatgaatagaataattgttattataattttttttctttagtcagaatctcactgtgttacccaggcatgagtgcagtgacatgatcttggctcaccgcaatttctgccacttgggttcaagcgattctcctgcctcagcctccaaagtagctgggattgctggccccagccactgtggtcaggctggtcttgaactcctgacctcgtgatccacccaccttggcctcacaaagtgttgggattacaggtgtaaggcagtgcacccagctgtataatttctacttttttttaccttctaaagtgtacatattgattttctaataaaattaccctagaaaaccttaagggatttgtttaaattgtgtattagtatatagtataaagttgacagggcagtggctagaaaaattaaaattataggaactctgggatttaagtttcttttaggtaagcttagaagaaacaaaactggaagtaccccagtggcatagagaacagaattctacataagtcctcacactgcctgagacctgatcagattcatgctttttggaggcgttatttaggtctgaccctaccctggagtcttgcctcacaggactgattagtagagatcagagttttggctggtgaatcctgctgcctttctagagctggtgctcacaattccctgaatcccaaaagcagatgaaagggaaaaatagtccgggcgcggtggctcacgcctgtaatcccagcactttgggaggccaaggcgggcagatcatgaggtcaggaaatcgagaccatcctggctaacacggtgaaaccccacctctactaagaatacaaaaaattagctgggtgtggtggtgggcgcctgtagtcccagctactgaggaggctgaggcaggagaatggcgtgaacccaggaggcggagcttgcagtgagcccagatcgcgccactgcactccagcctgggtggcagcgagactccatctcaaaaaacaaaaaaaaaaaaagggaaaaataaagtacgtattttagggtcttagtttttaaattttctgttaaagccagtgtttgcagagacattctatttagcaacttgttttctattcttgcagatccagtagttgctccacaagtcacagaaaagtaaatatgaacagaataaaattttctctaaattacattaaattattcctttctatctctttcatctgtctatattttgcttttacagtgttttaaaaaaattcatgacagagaaacagaagaagaaataaaaatgccgcaccctttacctaaatcctaaagtttattaaacacttagtaccagctttcagggtgttatgagaattaaatcacagaatgtgctatgcccagcacagtgctctgtatcattctcttgagcacaaagtacctgcttaataaacattgcattagtacttgtgtacatgttgttttttaaatacagacttactctgtcatttctgccttcagtttcctctataaactttaaagagccagcgaagcatataaaactttagggtggagatgcgttgtccctatttgtatcagaagtatttggttgtgaaaagagtgctaaatgtaagggaccctgtgctgttcctgctttctctaactaatgctaataatgagccaaggggaagcaacttcagcattgacaggggacttgtttaaaacacccattcatggacccttttcaagcctccagaatcacattacataaagtggacccaaaattaccaagtgatttataagcccattaaagcttgagaggcaatgcttagcttagtgattaccagcccaggcttttccttaggaacacatggccaatttgcagaaacctcttgtgccctccccacagcttctgtttgttctgcatggaagcacttatgttgttttaatgaagggtctcatgtgactctaaggtgaggccagaatcaagtatgagcacttcaaaatacaatacaaaggagttaagttccacctttgcactaaagggtggtcacagggcctgttctgtttgggtttggtacagacaggtcagtgtggtgcataattccattactggaaattgctggtgtctgtggcagggagggcacctgaggacaggaaatgagaaacttatatttctatcttcatggagcaattcattgttccctgaatctcttctgtttcaaaggacagaaataggtgggctttttctgtcattttgccagttgatgtcatgccagcaggtaatcatgtgttactgatacctttaaaggcatgttctcaagatgcaggtgtaatttttccagagaatctcatctgagaaggaattccagaggaggaggaggagaaaaaaaagtggctcttcttaaggtaaacgtgtctcagatgaagagctgtgtccactctgcctcctggacccccatgagtttagtactcacaaacctttacttctctacttgtgttttccctccctgagtttggttttactacttaaaattcttatgatagtcaagggtctctgaaaaatatttctttcctatatcccagagctttctctgcattctctatgtcatagcttcttatatgccatgcagaattctcagcaagaatttgtaatctgcaatattaaaaatgttccctttgtggctgttgaacatggaaagatgtggatactcaagatttctgttggggaaaattgtggtccttagtatagatgaagaacatgtaatgttgaggcttcatctgtatgttccattagctctatgcagaacaggattaagaaaatgcttttttatatggaatggcatttattatccagaaagttctgaaagaaattattaggagatacctgctctcttgggtgctaaatgaagcctacttaaaattactactaaaaattacagaacataggagttatcaaaaactttgaagttagcataaaacatgtttctttatggttaaattcagattttatttactttctttgggaggaatatttcaacagtgatgctgtgttcttctgtgtgaattaggacatcataaaaatttatcgtagtgcagttaatggttaatgattcagttggtgaaatagctctctgacagatttttttcactatagagataattatttttctattcattattatgtttatgcagctgatatgcataaacctcacattaaatctggcagctttcttttttaaacatatttttcttagggaaatgaagcctcttatctttgtttacaggctagaaaatctgaaaaaaacacaggctcttgcacttactgcatttgacaaaatatcatttttgggacaaaaacattaacattattggtgagcttgttagaaattcaaaaaatcagactttatgccagatcttttggaaaaaaaaatcctgcataagaaggacttcagcttattgtacatgttaaaattggagagatgacttctaactcaacatgtcttttctgtctgaaaaatattcataactgattctgtatgatgtaaatatagcactcaaaaatgtacatgttcatgttcatgccctttattttatactttattatctagaaaaatatcattatatgaactaatgttgtggatcttaggctgctcttttttttcagagatagagaatacattagaaaatatttctgtattgaaaattattttattggataattttagtcaatcctataagtaagaatcagttctcttactctctcatttcaccttaaattaaaaattccaccaacggcgacttggtgaaaatgtgtgtgtgtgtgtgtttttcaggaatcattgcaatttagagatgtggctgtagaattctctctggaggagtggcattgcctggacactgcacagcagaatttatatagggatgtgatgttagagaactacagacacctggtcttccttggtgaggataacttaaatacataattcataaaaaaccccaaaagttttatttctcttttttgcagaatgattttagtaatttatcctttgcataaaagagttccagatgtcctttttccagaaaatcttcagaatttgtttatttagaaaagaatttcttcaagatgtttcatcttaatccaaactttccacattgctgagttgagctttattcttcactctaaattagtggtaatttcagaaatttagtggcataaaatagtgttgccctcagctgaaaatctcattgccaccatcagtttttgattcagtagtatcaggtagtaaatttaaaaagccttcatgcagggccaggcgcagtggctcatacctgtaattccagcactttgggaggctgagacgggcagatcacctgaagttgggagtttgagaccagcctgaccaacatggagaaaccccgcctatactaaaaatacaaaattagtcgtttatggtggcatagtcctgtaatcccagctactccggaggctgaggcaggagattcccttgaacacaggaggcagaggttttggtgagccgagactgagccattgcactctagcctgggcaagaagagcaaataccactctaattttgataggaagtttattgaatctatagatcactttggataatgtggcaatttaaaaatctatttggatcttctcttcgtagatttttattgtaaagattttttaccttcttagtaattttttaaagaaatttattatttaatggtatagtaaataagattttttctttctctattttatcagatagtttaagtgtttgagaccatacatatacttgtatgttaattttatgttttgctaatttgctgagtgtatttgtcagtttagaaaggttttaaggtattgtttatgttttttttttttttttttttttttgagatggagtctcgctctgttgcccaggctggagtgcaatggcatgatctcagctcactgcaacctctgcctcctgggttcaagcaattctcctgtctgagcctcctgagtagctggtactactacaggcacgtgccgctgcacccagctttttgtattttagtagaaatggggtttcaccatgttggccaggctggtctcaaactcctgaccttgtgatccacccatcttggcctcccagagtgctaggattagaggtgtgagccactgcaactggccctatttatggtttttaaagtactgcttaatgttttttaaatataagattgtatgatctataaacagcaactttttacttattttactccatctccaaaaaaaaaaaaaagaaaccttaaagttgaaagtattttctaaatatttagaaatttgttatgaattagtattttggtattaatttactagaatattttattacattctttctgctgagcacattactagcttgtaattgagaaatataagcaagattaatgctatttatttttaatgaaacaggtattattgtctctaagccagacctgatcacctgtctggagcaaggaataaaacctctgactatgaagagacatgagatgattgccaaacccccaggtaggtgcgaatgaaaatgaacacaacagacaatgcagataagaggtcccaaggtcaaaaagaaagccagtccttaaaatgtgatctgggaagctgtgttccaaaggaaatagttcctgggcagctgttttatttatttatttatttatttaatttttctctcacaaagggacatctgtctcatgcttttaaattctctaaggattctactattctttcggtgagcttccttcaagttcacagtgagagcgaaattcctctttatggcatataagtgattgcacaatctggctgcttttccgttgccttggggacacacaaatatctgcgtgattttgagaaactaaaacccttttttaagttgtctttttgcttcagatctgaaatgtgtgacagtattagtttttgttgcattttttgttcattttttctgcacagtccattctgtttttattactatatagtcttgaaatatagtttgaaattataagtatgatatccttctgctttgatctttttcctcaagattgctttggctatcaaagttattttagtatcacgtaacttttagaaatgtattttccattactatgaaaaaaataccactgcaattttgataggaggtttattgaatctatagatcactctggttaatacggcaattttaaaatttatttggatcttctctaatattttcataggtttttttttttttttttgagaaggagtcttgctctgttgcccaggctggagtgcagtggtgtgatcttggttcactgcaaactctgcctcctgggttcaagcaattctctgcctcagcctcctgtgtagctgagattacaggtgcatacaaccatgcctggctaattttttttgtattttttgtagagaggggtttcaccatgttggccaggctggtcttgaactcctgaccttgtgatccacccacctcagcctcccaaagtgctgggattacaggcatgagccaccccgcccggcccatagtttttttattgtaaagatttttttacctccttggtttttttctaagaagtttattacttaatgctatagtaaataagatttttttcttcctctattttatcagtttgttttaagtgtatgagaccatacatacacttgtatgttaattttatattttgctaatttactgagtgtatttatcacttcagacaggttttaatgtactatttattgatttttaaatacaagattatacgatctacaaacagcgactttttacttatttttctttaatttcaatggatttttttatttctttgactaattcttctgccacatgcttccagtgctacattaaaatagaagcattgacaatgggcacaatatagttttgtattggtgcctaaatttgatggagcaaacacctcttcaagtttttttttttttttttttttgagagagtctcactctgttgcccaggctgcagtgcagtggtgcagtctcagctcactgcaacctccacctcccgggttcacgccattctcctgcctcagcctcccgagtagctgggactacaggcgcccaccaccacacccggctaattttttaaaaatttttattagagacagggtttcaccgtgttagccaggatggtctcgatctcctgacctcgtgatccatccgcctcggcctcccaaagtgctgggattacaggtgtgagccaccacgcctggccttcaagtttttataaactgattttagaaggtaaagatcttttgttgggcccttagggtgatgagatgccctctgaatttgtagtggagagggggtgtagcttggtgacaaggctgctgggtctgcactagggtccacctttagttggcttgttacaggggcttgggtagttgtacttctcattttatttttggacagactgcatatccttcagggctttgctccgtagttaaaacactagggtatgtttttgtagtcaggtctgcatatggtgggccttatatctggatattgatgagtatggcttttattgagtatcagagagcattccctcagataactgtgggtttctatataggcagaactgaccataaactatcttgtttaagtgagtagtcatggagatagtcttttttttcaccatgtgtttaatgatgaatatatatttccttttgtgagagaaatacttgtttgatttgaaggtaattttcaaaaagatttataattctggattttttttcagtttttctttaaaaaaattgttttaaaaacacataacataaaatttaccatcttaattcaagtgtacattttcagggccaggcatggttgtggctcccatctgtaatcccaggattttgggaggccaacacaggaggatccctggagcccaaaagtttgagaccagcctgggaaagatatggagacccctctttataaaaataatttaataattgccaggcatggtggtatgcagctgtggtacctgctacttgggagatggagggggagtcaaaattgtgccactacactccagcttgaatgacagagtgagaccctgtctccaaaaaacaaaaaaaagctgttcatttcaggcatgttaagtatattctcattgttatgtaaaatacttctagacactttacatcttgtaaaactaaaactcaatacccattaaataacaactgctcattttaccctctctcaccctcgacagacaaaccttccactttctgttttatgatttgactacttaagatatccataattttgttactggattaattcaagtgacataatattctcaatgttcatcttaaaatgtgacaagattattctttttaagatggaataatattccattgtatgtatatgttacatattttgatgtgtttataaatcaagagacatctgggttgcttcaaccttttggcttttgtgaatactggtgcaataaacatggattttcaaatatgtcttccaggtcctgtgttgcttttctttttttctagagatggattctcactctgtcacccaggctgaagtgcagtggtgtgatatcagctcactgaaacctctgcctcctgggttcaagcaattctgcttcagcctcccaagtagctgtgattacaggtgcccaccaacacacccagctaattttttgtatttttagtattatggggtttattatgttggccaggctggtctcaaactcctgatctcaggtaatcacccaccttggcctcccaaagtgctaggattacaggcttgagcacctgggcctggcctgtgttacgtattttgtaaatagatataataagtgaggaacatttataacatttttaaataatggctgcatctttgttttccagcaagaagcaacatgggtttcatttttattgcaacatcaacagattgggtgtttttaaaaaaatttacagtggccattctaatggatatgaggtgattttgtttgtcattgtgtttttttaatttctctacaaatcagtaattttgtgcattctttcaaatgctttttcccatttgtgtagttttttgatgaaaaatctttttgttcatttttaaatcaagttattgaactttattgattagttttaagagtttttatttattttgaacattaacttccttcacatgaaatctgcaaatgttttcatccattttctaagggatgttgccacttttgaattttcttttgatgtacagaaattttgatgtctagtgtagttaaacttttcttgtatttgttgctcatgcatttaatgtcgtatctaagaaaatggtggcaagaccaatgtaatgtccttttcctgtattttttctaatagatttgttagtttctttatgtctaagtattttgtttaaaatatatttttgtatcgttcaaggaaataacccaattttattttatcagtgttgatattcagttttcaacatcattttttgaagatattacttttctctattttgtactcatagcaactttttgaaagaccatttgatcatatatagaagggttcatttctgagctctctattctggtctttcatctgtttatctttgtgtcagtatcacattgtttatgttactgtagcctttaactgtaggttgtattgacatctgtgaagaataaaattttttgacccctgagcaagaatatgttgaatcagagtgttttatattcacatatttttgaatttgccaatttaccttttgcttttaattcctagtgtcattcagtttttgttagaaaacacacaatgtataattttagtgtttttaaattgatttgttgttgttttaagacaagatcttaccaacaccaaggctggagtgctgtggcataattttggctcactatagcctcagcctcctgggctcaagtgatcctttcacctctgttttctgaccagcttggactacagacatgtactaccatgtctgcctaattgtttgcttgtttgcagtgttaggatctcattatgttgtccaggctggtctcaaacttttggccctaatggatcctcttacctaggtctcccaaagtgttagggttataggcaagagccactgcaccccgtcagtacttttaaatttaataaaacttggtatgtgtcctaacagattataccagatgcaaataagaatattgtgtattatcttggttttgactggagagttttgcttgtgtctgtgaagcctagttggtctataatatggtttccatgttcatgttctccagacctcatgctgcaaaataaatcttcaatgttggatgtgggacctggtgggacatgtttgtgtcatggaggcaaatttctcatgaacggcatggtacatcctcttggtaaccaaaactttacactctattaattcaaatgagagctggttcattaaaagaacctggatccttcacctcacacttgctctgtttcattaacatatagtatgtccaattactctttaccttccaccatgattgtaagtttcctgaggccctcaccagaagcagatgctagcacacacttcttatagtctgtcaaactgtgagccacataaattatttttctttaaaaattatgcacttggctgggcacggtggctcatgcctgtaatccctgcactttgggaggccgaggcgggtggatcatgaggtcaggagatcgagaccatcctggctaacatggtgaaaccccgtctctaccaaaaatacaaaaagccgggcgtgctggtgggcacctgtagtctcagctacttgggaggctgaggcaggagagtggcgtgaatctgggaggcggagcttgcagtgagctgagattgctctactgcactccagcctgggcgacagcgagattccttcaaaaaaaaaaaaaaattatgcactcggctgggggcggtggctcacacctgtaatcccagcattttgggaggcccaggtgggtggatcacgaggtcaggagatcgagactctcctggctaagacggtgaaaccccgtctctattaaaaatataaaaaaattagccgggcatggtggtgggcgcctgtagtcccagctactcgggaggctgaggcaggagaatggcgtgaacctgggaggcggagcttgtagtgagctgagattgcgccactgtactccagcctgggcaaaagagcaggactctgtctcaaaaacaaagaaaaaaagaaaaagaaattatgcagtctcaagtattcctctgtatgcaaaataatatggtctataatgttgcgtaagttgtctgtttctcattttttctctgaattttctatttattattgcaaatggggtcttgatgtctacaatttttatgttgctatgtatgccttgcttcacttttgtcaatatttgctttatatattttggagccctgatgttatatacacatatacatatagatagataaataatatagttaccgattcctggtaaattaactcactttaccataatataatatcattctttgtctaatggtagtatttgacctatagcatattatgtctaatataattgtgaccacctcactcaattgtggttactatttttatgatatacacatttttttccttctgttactttcagcctatttgactcaatgctacaatgagtctcttgtaggcagcatactgtatgcttttaaagaaaccactgaggcattctatagctttttcttcatatgtatatatttatttatgtatttattttgagacagagtttcacttttgttgcccaagctggagtgcaatggcgtgagctcactgcaacctctgcctcccaagttcaagtgattcttctttgtcagcctcccaagtagctgggattacaggcacctgtcaccatgcccagctaatttttttgtattttaggtagagatgggattccaccatgatggccaggcttgtcttaaacttctgacctcaggtgatctgcccgcctctgcctcccaaagtgctgggattacaggcatcagccaccacgcctggcctcatttaactttgagatagggtctcactctgtcaaccaggctgatttgcatgattcactgatgccagaacctccaaaactcagatgatcctctcattttagcctctcaaacagctgggttacaagtatgtgtcatcatagccatctatgttttttgtattttttgtagagacagagttttgccatgttgcccaggctggtcttgaactcatgggatcaagtgatgagcctaccttggccttccaaagtcctaagattacatttgattttattaagtagtataattaatttatatttacaatgaataaacaaatgaagttgtcattagcagttagattgttactgttttatgtgtttctagtagttatatttttctcatctcctgttttactttcttaattttcattttattttgtactggcatgctttcattactttttatcttcttttgcatactttctataaatattatctttgtaatcatcttgaaaactggagattacatacatcttaaagttaaaacaatatgtttcaatctcataacttcaactgaatacaaaaactatgcctctatattttatggtttgttactgatataaaaattattttatatggtgtatctattaacatttatgcagatttacatatttcttatattttattaaaaaactttaaagtttttatgtaccatcttttttttttttttgaaactgggtctcactctattgcccatgatggagtgcagtggtgtaatcttggctcactgtaacctccaccaggcatggtggctcatgcctgtgttctcagcactttgggaggccgaggtgggtgaatcagaaggtcaggagttcgagagcagcctggccaacatggtgaaacgctgtctctactaaaaaatacaaacattatccgggcatgctggcaggtgcctataatcccagctcctcaggaggctgaagcaggagaattgcttgaacctagaaggcggacgttgcagtgagccaaggtcacaccactgtactccagcctggacaacagagcgaaactccgtctcaaaaaataaaaaaaaatatgtcttttgattggaaagatgattatatatatatttaaatcgttttctgcaatagaaaaacttactgttatttttattaattgttttatttgattcttctatctttttcactcattttctgtcttttttgtgtttttttaattttttgtattgatatgctttcagtttcttattttcttttgtgtatctatacagctattatcttagtggtaacatgggggattacataaaacctaaaagatccaacaatatatttgaatgtggtaaaaaaattaacttcagttatatactgaaattcttcatcattacatttgccttcaactttgttactgattttgctaattatattttttatgttgtatatttattaacagatgttaacaataatttctatacttttatcttttaaatttagagagtattaaaaatgttttctgtaccattatgatgttaagaaattccatttttgtgtatgtggatatcttttccagaaagttatgtattttcatagattatctgttgttttcttgcattatgttattttcagtggaagaaactccttttagcatctttgatgtgtatggtgtatgcagtgccaatatactttctcaggatttggttattttggaagcacttgttttatttggtagtacaattttgctgatggcattattgcatttgacagctttttaaaaaaattattataactttagcaatatcacagtttttttctgacgtgtaagaatgttttaaataaattcactggtgccggttgtggtggctcacgtctataatcccagcactttgggagactgagacgggcagaccacctgaggtcagaagtttgagaccagccaggctaacatggtgaaaccctgtttgtactgaaaatacaaaaaagtagccaggcatggtggcgcacgcctgtaatcccagctactcaggacgctgaggcaggagaatcccttgaacccgggagttggaggttgcagtgagccaagattgcatcattgcactccagcttgtgcaacaagattgaaactctgtctaaaaaaaaaaaattctctggttatctcatgagactatgcttataaatggaacatcatttttatcttgtagcacccaaaattctattcttatatgtgatttttgaaattttgcttatatatgtgtttgttataaatatatttgtgtgtatctaagtttgttcattcagctttttcatgtttacatcatattttcttttaataaatttttcagttttttatattttttatatccacgattttcggttttttggtattttagtatttctttttatagttgtctgggtttctatttttttcttatacagagtctttttctgtcaccgaggctggagtgcagtggcgtgttctcagccaggctgatcttgaactgctgacctcaaatgatccacccacctcagcctcctaaagtgctgggtttacaggcatcagccactgcacccaacctttttaattttatttttgagacagtgttgctctgtttcccaggccgcagtacagtggtacaatctccactcactgcaacgtttcccgcctggattcaagcaattctcctgtgtcagccttacaagtagctgggattacaggcacatgtcaccatgcccagctaatttttgtatttttagtagatacagggtttcaccatgttggccaggctggtctcaaacttctgacctcatgtattttcccaccttgatcttccagtgtgttgggattacaggaatgagccaccaacagtgggatgttcaattcatttggaattttaaaaattactttgtatactttttatggttgcttttgaaaagtttataatttttttgatggggccatgttctaatatttggtatacattatcatctttgatagagatttggaaattaacaaaaagctacctgttacaatctttataatatagctttgtcctggcgtagcatgaaatcaattgtcttggctagagattctgggaatttttcaaacatgtttttaggatgagtcttgtctaaaattttgtgtttattgtttagttaaatcagcttattcatatctcttcttaatagtcagtaatcacctgctacacccattccctgtttgcagtttctctgcttctctataatttacctttagactcagcaaactcaaactgtcattccaatgtatatcaccatttttttttagcattttatgtcatgggacacattatctggtgtctaaaaaagcccctagaagacaaataaagatgtatgtgccaatgtttcttgttttttaaaaaggaaaccaggagttggcaatttacatttttgtgtgtatgtgtgagacagagtctcattctgttacctagtctcaagtgcagtggcatgatcttggctcactacattctctgcctccacagttgaagcaattctcctgcctcagcatcccaaataggattacaggtaactgtaaccatgcctggctaatttgtttgtattttagtagagatggggttttaccgtgttggtcaggctggtctcaaactcctgacctcaggtgatcctcatgctttgccctcacaaatttctggaattacaggcatgagctatcatgccttgttggcaatttactttaaaaaaaaatttttttttgagatgaagtcttgctctgtcgcccaggccggagtgcagtggtgcaatcttggcttactgcaacctccgtctcctgggttcaagaaattctcatgcctcagcctcctgagcagttggaattacagcggcccatgaccatgactggctaactttttgtaattttagtagagatggggtttcaccatcttggccaggatggccttgaactcctgacctcaagtgattcacccatctcagcctccgaaagtgctggtattacaggaatgagccactgcaccaggttggcaatttacttttaaaggcacaatgttatactggagagcaggaagagctgttgcatataagtaacagaattttctttatcttctatgtgactgtttgcattgtgctcacctagggactttcacacacttaaaactcacttataaattttttacaaatgtattttggtcagtatgtttttgttacctttatatgtccaggaagaaattacagcttgtggcattttgctatgtcatcttgcttatgtagtttgtataattttataggttagatttgtaaagtatatttatctgagtctagcaattgaagtaatgtgtttttattgtttctttcagttgtgtgttctcattttgcccaagacctttggccagagcagagcataaaagattcttaccaaaaagtgatactgagaaaatttgaaaaatgtggacatggcaatttacactttaaaaaaggctgtgaaagtgtggatgagtgtaagttacacaaaagaggttataatggacttaaccaatgtttgacaactacccagagcaaaatatttcaatgtggtaaatatgtgaaagtctttcatcaattttcaaattcaaagagacataaaagaagacatactgaaaaaaaacctttgaaatatatagaaggtgacaaagcttttaaccagtcctcaacccatactacacataaaaaaattgatactggagagaaaccatacaaatgtgaagaatgtggcaaagccttcaaccggtcctcacaccttactacacataagataactcatactagagagaaaccctacaaatgtgaagaatgtggcaaagtctttaagtacttctctagctttactacacataagaaaattcatagtggagagaaaccctacatttgtgaagaatgtggcaaagcctttatgtacccctatacccttactacacataagataatccatactggagagcaaccctacaaatgtaaagaatgtgacaaagcttttaaccatcctgcaactctttcttcacataagaaaattcatactggagagaaaccgtacacgtgtgataaatgtggcaaagcctttatttcatcctcgatccttagtaaacatgagaagattcatacgggagagaaaccctacaaatgtgaagaatgtggcaaagccttcacccgctcctcacaccttactatgcataagataattcatactggagagaaaccatacaaatgtgaagaatgtggcaaagcctttacatggtctgcaggcctccataaacataggagaactcatactggagagaaaccctacaaatgtgaagaatgtggcaaagcgtatactacatcctcaaatctaactgaacataagacaactcatactggagagaaaccttacaaatgtaaagaatgtggcaaagcttttaactggtcctcagaccttaataaacataagagaattcatattggacagaaaccaagaacgtgacaaaggattattttattattattatttttttgagaggtaattctgctgttgtttcccaggctggagtgcaatggcataattttggctcaccacaacctccaccttctgggttcaagtaactctccttagtagctaggattacagggctgcaccaccacacctggctaattttgtatttttagtagagatggggtttctccatgttggtcaggctggtctcaatctcctaacctcaggtggtctgcctgctttggcctcccaaagtgttggggttacaggcatgagccactgtgcctggctgacaaagctttttaaggaagttctcaacccttattacacataattcatactggacagaaaccctacaagtgtgaagaatgtggcaagcctgtaacaagttctcaattcttttatttttatttgtttatttattttttgagatgcagtttcactcttgtgacccgggctgtagtgcaatggcatgatcttggcttactgtgacctctgcctcctgggttcaagccattctcctgcctcagcctcccaagtagctgggattacaggtgccaccaccattcccagctaatttttgtatttttagtagagatgggcttttgccatatttgccaggctggtctcaaactcctgacctcaggtgatccactcgcctcggcttcctaaagtgctgggatgacaggcatgagcctcaattcccagccataagctcttaattcttaagagacatggcgataattcatggtgaagaggaactttacaaacctgaaagatgtgacagtgcttttcccaacacctccaacttttctatgcataaaaaaaattatactacaccatagaaatgtatgaaatgtgacaaagcctttatatggttgccacactttattgtaggtaattcatacttccaaaatacctacaagtatgaagaatgtggcaaaacttttaatcagtgcttacaccgtatttcacaggaaagctattatccttgagaaaaattgtacaaatataaagaatatggaaaagccattaatgtccatcacatcttactcaacagaagaaggttcataaaagagcaattactgtgacaaaaatctttcagaaaatataagcctttaaggtgaagaagagtattgattctgaagacaagcattacaaatataaagaggtttgtagtacctttgcttgtattacagatcttattgcccgcgttttgtattagaaggaaaccctaaagcggttgccaaactttgtgcaacatcagggaatgtatattgaagaagattcctgcaaatgtaatgagtttggaaacacttcttagataaattatttgtggctgggcacagtggctcatgcctgtaatcccagcactttgggaggccaaggtgggaggatcacctgatgtcgggagtttgagatcagactgaccaaaacggagaaacccagtctctactgaaaatataaaattagccatgcatggtggcacatgcctgtaatcccagctactcaggaggcttgaaccctggaggcagaggttgtggtgagtcgagatcattgcactccagcctgggcaataagagtgaaactctgtctccaggaaaaaaaaaaatttatttgtgtataactttaaaagcagatttttggaagcattgtaattacattaaaagtatacttgttccagctgcgtgtggtggctcatgcctgtaatcccaacactttgggaggccaaggcaggtggatcacgaggtcaggagttcaagaccatcttggccaagatggtgaaaccctgtctgtactaaaaatacaaaaattagccatgcatggtggccggcgcgtataatcccagctgcttgggaggctgaggcagagaattggaattgcttgaacctgggaggtggaggttgcagtgagccgaggttgcaccattgtccagcctgggcaacagagcaagactccatctcaaaaaaaaaagtgtatttgtttccttaaaaaaatttttctgaaaagtgggtaatgacataatacagctttcaaattactttatgctgttattttattcttattgtattcacatgtgaaagcatgtgatcaatttttgctgcatcagagatattagagatagttttttattaattgggcatttatgaccttttctataaaagtaaggacattaaaatgtaagatgcatgatgaaaatataagtggagaggctctttgtagttaacctatatgaagtaatgtataaggtaggtcagagtaatacttttctacattatagtgcaagaaataattattgataaaagtatattaaactaaattcgtatattttacttattgtacttttatgtaataaaatgcagtgcatttaaaaattgttagattatgtgtgaatttaattttatgttttttaccatgttaagactattgtgcatttaatgaagcattattatgccactaacctatcccaccttactcaaaggtgtaggtaaaagatggtagcaatatactatttggtacataatggaataatgtctctagtaatcactttgccagtggctttaaacagcaaatgaatttaagaatattgttcccataggttaaatttttattctcttttcttactgaaatttattattagtatttgtgagtatatagtatatgtatatatttatgctttatatggcatattttgattcaggcctataatatgtagtaactacattagggtaaataaggtatctatcacctctagcatttatcctttgtattaaaaacagtgtaattatatacttttagttattttaaaatgtacaataaattgttattgactacagggttatttttatgatcataataaaaattatacagaaatataaataaaatacagccaggcccagtggctcatgcctgtaatcccaatactttgggaggacaaggcaggtggattgcctgaggtcaggagttcaagactggcctggccaacgtggtgaaacctcgtctactaaaaatacaaaatatagttgggcattgtggtgcatgtttggaggctgaggcaggagattcacttgtaactgggagctggaggttgcactgagctgagattgcaccacttcactccagcctgggcaacagactcaatctcaagaaaaaaagaaatagaaatcatacatatactgaaaacttattaataaatgtttgttatatggttttctttgaacatgtggtctttgcctgcaaatgtagactttcagtgttaatttacatcagttaaatatacacatattactctgaagataaaccttagatgtaagaaacttatggagtgtgtttgtgtgagcatgagattgtacatattttcagaagaaaagaacaattattggaacaaaacaaattattttaataaggtggctaataaaaaactaagctccttgagaatgctgaaagcaaatctatgctttctgctttgtcttgaatttattaatataaaattttatggcttatgtttcaaatttttttcagaatctgtctattaaagtacaggcagctttgtctccagaaacaacgctcttgagtacaacaataaaagccctcttcaaacagaaaacaaataatcatagttaacacttgttttaatgaaaattcaaccaaaattaaataattagatatatttttattgtcctatgtgtgtgtgaatgtataaaatggtgcataaaggaaaaatatgccagaaaaaaagttaatatttgtaatgaataaaactggaaattagttcattatttgcaggtgatatctttgtttatgtagataacaaaagcagcagaaaactttcacggagtctctctctgttgcccagggtggggtggagtgcagtggtgcgatctcggctcactgcaagctccgcatcccgggttcacgctgttctcctgcctcagccttccgagtagctgggactacaggcgcccgccaccacgcccagctaattttttgtatttttagtagagacggggtttcgccgtgttagccaggatggtcttgatctcctgacctcatgatccacccgccttggcctcccaaagtgctgggattacaggcgtgagccactgcacccggccaaaacctttttttttttttccaaagaattataaatagaagattctaaagagaagtttttaataaataagcatttaaaagaaactagggttacttgttatgtttaaaatatatgctgttctcacacaaaatgaaactgctgaaatccaaatttagaagcaaagaatagacttaaattgttaaacatagaaaatataaatatatactttgaagaacaggattaggcaccttgatacgtgaaagaaaatattaggaaataaactattttattcttcagatacaggctgaagaaagtagatgaaaaccctgtaattcctttttgcctgcagcaaacttaaatttataagtaattattttggtaaatatggagtgcctactaattatgtaatttacttcatgcataacatgcaaattctagcatattgtcataaataaatctaaaattacagacaaatttgaaatagaaaatagtcaaaatgtagagggcgagtgacatcagtaagatgaaagattaaaagttccctaattttatatccccttacagcaaaaaacatcggccatccctgacaaaaatgcctttattggctgggcacagtggctgatgcctttaatcccagcactttgctgagatctgctgagacgggcagatcacgaggtcaggagtttgagaccagcatggcaaacatggtgaaaccctgtctctacaaaaataccaaaaaaataggcagtcatggtggcacacgtctgtaatcctagctactcaggaggctgaggcaggagaattgtttaaacccgggaggcagaggttgcagggaggtgagatggcaccactgcactccagcctgaatgagagagtgtctcagagaaataaataaatgcctttattagaaaaccaggcattatggctcacacttgtaatgacagctacatggtacattaatgatggagaacagcttcaggccaggatttcgagaccagcctgggttatgtagcaagatgtcatctccaaaataagtgcctctatgagagatgtgagatccagggagggagttgtgaaactgttaaagcttaaggttgagaagtgttctattcagaaggcaggccctcattcaggtggaaaactatatgacccctgttctaggctacagaccaggatagggttcacccaacttggtcccactaagaattctgaacttactgtgtaatcatctgaaactcctccagccacagtctggcagaggtcttgccattccagagacctggaggaaggtgcccattcacagccatctaggcaggcctgcagaccttggcctgtacaggggtccctgaagtggttcagtgactcagtttcagttacctgagccacagttcatggccagttcggcctacatagaaagctacagagttacttgaaaaaataatctctggtactcactgaaagccatactcatctacatcctgatacaaggcccaccatatgcagaaccaacttcagaaacattccttatgtctgccctatggagcaaagtcctgaaagatttgcagtctgtccaaaaataaactgggaattacaattacccaagcccctgtaacaagccaactaaagatggaccctagtgcagtcccagcagccttgtgaccaagctgcaacccctcttcactacaaattcagagggtttctcatcatcctaagggaccaacaaaagaagatctttatcttctaaaatcagtgtatgaaaacttgaagaggtgtttgctccatcaacttcagacaccaatacaaaactatactgtgcccattgtcaacacttctattttaatctagcaccggaagtatgtggcagaagaattagtcaaaaaaattttttaatccattgaaattaaagaaaaatgagtaaaaagttgctgtttgcagattatacaattttctatttaaaaaactaagcagtatattaaagcctgtctaataaatgcactcagtaaattagcaaaatataaaagtaacatagaagtatatgtatggtttctttcacttaaaacaaactatctgataaaatacagaaagaggctgggtgcggtggctcatggctgcaataccagcattttgggaggccgaggaaggtggatcatctgatgtcaggagtttgagacaagcgtggccaaaaaggtgaaaccctgtctctactaaaaatataaaaattagctggatgttgtggtgggcaccggcaatctctgctaattggtaggctgaggcaagagaattgcttgaaaccaggaggtggaggttgcagtgagcccagattgtgccactgcattccagcctgggtgacagttggagactccatctcaaaaggaaaaaaaaaaaaaaatagaggaagaaaaaaatcttatttactataacattaaataataaatttctgagaaaaatattaaccaaggaggtaaaaagtctttacaataaaaaaacaaaattagagaagatccaaataaattttaaaatattttatgtctatggattgaaagaataaatattaaagcaccatgttatccaaagtgatctatagattgaagaaacttcttatctaaattgcagttgtattttttcacagtaatggaaaatacaattctaaaatttacatgaaattaaaataaactttgaatagccaaagcaatcatgaggaaaaggaacaaggcagaaggatatcatacttataatttcaaattatatttcaagactatatagtaatgagtggactgtgcagaaaaatgaacagaaaaattcaacagaaataactactctcacacatttcaaatctgatgcgaaaaaaaccttaaaaaatagttttagtttcttaaaatcatgcatatatttgtgagtcccaaaaacaatgaaaaagaagccagattgtgcagtctcttatatgtcatgaagaggaatttggctttcaaatttggcttatatgtcatgaagaggaatttggctttcactcaccccatcgttcctaaccttacaccattcttagcaaaattccatatgatcatcaatggtttacaatgatagatttgaaggatgccttctgggcataccccttgtctgatgatagctgagatatatttgcttttgagtggtaagacccctatttggggcagagacaacaatattgatggacagtcttgccccagggtttcacagactcccccaacctctttgttcaggtcccagaacaagtactagaaaaagtcacagtccctaaacaaatatgtctgcttcagtatgtggatgatcttcttatatctggtaaagacataaaagaggtaggtgacttctctacacacattctcaatcacttgcagtgtgaggggttgctggtctcaaaagggaaaattcagtatgtagaacctgaagctaaatacttaggctacctaattagtgcaggtaaatgaaaaacaggacctgaaagagaattgtttccctacccttgcctcaaactaaacaagaactcaggaaatttttaggactaattggatattgtcatttatggatttgactcatatgcatgaaagagtaaacttctatatgagaaacttgcccagtggaaggctgataatttcttgtggacttcccaagaaatccagcaaattgaggaattgaaagggacactcatagccaccccgttctagctctaccctccctagaaaagccatttcaccttttcattaatgtaaataatggggtagccctaggaatgctaacccaagaacatggaggctgccaacagcccgtggccttcttgtcaaaggtcttagacccactcactcataggtggccccagggtatccaatccattgcagctacagcagtattagtcaaagaaagtaggaaggtaacctttggaggaaagttaacagtaagcctgccccaccaagttagaactatattaaatcagaaagcagggaggtggatcactgactcaataattttaaaatatgaggctattttactggaaaaagatgatttaatattaattgagaatatcatacctagatttagactaatagaaaatattagtctactactactgataattcacttaatccagcaagatttttaacagaggatccaaacttaaaacgagagcatgtatgtttagatctgattgactaccatacaaaagttcgaccagacttaggagaaactcccttcaagacaggttggcacttattcatagatgggtcttcccaggtgattgagaggaaaagacataacaggtattcagtgattgatggagagacgcttgaagaagtagaatcaggaaggctgcctaatgattggtctgcccaaacatgtgaactgtttgcactcagccaagctttaggacatttacaaagccaagggtatactgactgtaagtatgcctttgccaggaaggaactatctatactgactgtaagtatgcctttggggtggcacacacatttgggaaaatttggatgaagaggttcttatcaatagtagaggccaagatttagttcatagctaattgcttgtgtcctcaacaatctccaattgccagaagagatagctatcgtgcatgtcgcagggcaccaaagggactttggtgtctgtagttctctaatatcacatccctatataaattccactgtgcagtgtccaggcaatgccattcctccagagagaattctatggccacatctctaaattgcaatggttcctgaaacacacacacacacacacacacacacacacacacacacacacacacatttttaccaagttgccattggtggaatttttaatttgatttaaggtgaaatgagagagtaaagggaagtgattctgacttacaggactaaaattatccaataaaataattttcaacacagaaatattctctaatatattctctaactctaagaaaaaaagaggagcataacatccacaacatcatttcatatatttttccatataataaagtataaaattaagggcatgaacatgaacatgtacatttttgagtgctatatttacatcatacagaatgagttgtgaatatttttccgatggaaaagacatgttgagttagaaggtatctctcaaattttgttttgagatggaatttcaatctagttgcctaggctgaagtgcagtgatgtgatcttggctcaccacaacctctgcctcccgggttcaagcaaatctcctgccacagcctcccgagtagctgagattacaggcatgcaccaacatccctggataattttgtatttttagtagagatggggttttctctatgttggccaggctggtcttgatttcccgaactcacgtgatctgcccgcctcagcctcccaaagtgctgggattacaggcatgagccactgcacttggctgatttttttaatttctaagaagctcaccagtaatgccaatgtttttggcccaagaaggatattttgtcaaacatccagtaagtggaagagcctgtgtttttcccagattttttagcctgtaagcaaagataaaagccttcattttccaaagagagatatgtagaaaaaaataagaaaaaaggacagctgccagattaaatgtgatggtttatgcacatcagctgcataaacatacttaataatgaagagaaaaataattaaccctatggtgaaaaaaatctgtcagagagctaattcaccaagtgaatcattaaccattaactgcacgaggacaaatttttacgatgtgctaatgcacacaggagaacacagaatcactgttgaaatatacttccccaaaaaactaaattacagtctgaatttaaccataaagaaacatgagttttatgcaaacttcaacatccagataactcctatgttctgtaatttttactagtaattttaaatagggttcatttagcaccctagaaaacaagtatctcctgataagttttttcagaactttctgggtaataaatgccatcccattttaatgagcattttcttaatcctgttctgcatagagctaatggaacacacagatggagcctcaacattacatgttctccatctttactaaggaccacacttttccccaatagaaatcttcagtatccacatctttccatgttcaatagccacaaaaggaacatttttaatattgcagatcataaatccttgctgagaatcctgcgtgacatataagaagctatgatgtagagaatgcagagatggctctggaatataggaaagaaatatttttcagagacccttgactatcataagaattttaacaagtagttaaatcaaacttattagggaggaaaaatacaagtagaaaaataaaggtttgcaagtactaaacgcatggcagtccaggaggcagagtggacacaggtcttcatctgacacaggtttacctgaagaaaagcctttttttttctttttccccttctctggaattccttctcagatgagattttctggacaaattaaacctgcatctgaaggatatgcttttaaaggtgtttacctgctagcatgacatcaactagcagaaaaagacagaaaaagtccacccatttctgtcctttaaaacagaagaggttcaggaaaaatgagatgctccatgaagatgaaagtataagtttctcctttcctgtcctcaggtgccctcccctgccacagacactagcaatttctgctaccttaatggaaatatgcaccacactgacctgtccctactaaacccaaacagaactggccctgtgaccaccctttagtccaaaggtggagcttaactctcatgaatgtattttgagggcctcatacctgattctggcctaaccttagagtcacatgaggcccttcattaaaacgtgatagatgcttccaccgagaatgataaacagaagctgtggggagggcacaagagatttctgcaaattggccatttgatcctaatgggaagcctgggctgataaccactaagttaagcattgcctctcaagctttaatgagattataaatcacctggtaattttggccccacttaatgtaatgtgattctgcaggtttgaaaagggtccaagagtgagtgttttaaacaagtcccctgtcaatgcagttgtttctcccccttggagaattattaacattagagaaagcaggcacagcacagggtcccttacacttagcactcttgtcaccaccaaatacttctggtacaaataaggacaacccatctccctcctaaagttttatagtctttgctggctctttagagtttacagaggaaacaaaagtcagcaatgtctgaataagtctgtatttaaaaaacaacatgtaaacatgtactaatgcaatgtttattaagcaggtactatgtgctcaagggtaagatacagagcactgtgctggtcatccctcattatgtaatttaattctcataacaccctgggagctggtactaagggtttaataatttttaggatttagataaagggcccagcatttttatttcttctgtttctctgtcatcaaattttttaaaaaactgtaaatagtaaagctaaatataggcagatgaaagagatatagaaaggaagagtttaatgtagctcagagaaaattttattctgtttatattcacttttttgtgacttgtggagcaactactggatctgcaggaatagaaaacaagttgctaaagagaatgtctctgcaaccactggttttaatggaaaatttaaaaactggccgggtgcagtggctcacgcctgtaatcccagcactttgggaggccaaggcaggtggatcacctgaggtcgggagttcaagaccagcctgaccaacatggagaaaccccatctctactaaaaatacaaaattagccaggcatggtggtgcatgcctgtaatcccagctactcaagaggctgaggcaggagaatcgctggaacctgggaggtggaggatgcagtgagccgagatcgtgccactgcactccaacctgggcaacaagagcaaaacttcatctcaagaaataaataaataaataagtaaaatttaaaaactaaggctctacaatatatactttatttttcccatttatctgcttttgggtttcaggaaattgtgagtagcagctctagaactgctgcaggattcatcagccaaaattctgataacttctaatcagttctgtgaggcaagactccagggcagggtcagacctaaataaggcctccaaaaagggtgaatctgaacaggtctgggacaaggtgaggaccctatagaattctgttctctatgccactggagtactaacaattttgttttttctaagcttgcctgaaagaagcctaaaatcccagagtttctgttattttcattttttctagccactaccctgtcaactgtatactatatactaatatgcaaattaaacaaatctcttcaggttttgtagtgtaattttattagaaaataaatactgtgcacttaacaacataaaagaaatagattttatatggccgggtgctgtggctcatgcccataatcccagcactttgggtggccgaggcgggtggaacacgaggtcaggagtttgagaccagcctgataaaggtggtgaaaccacgtctccactaaaaatacaaaaattaaccaggtgcagtggcaggcccctgtaatcctagctacttgagggactgaggcaggagaatcacttgaacctgggtggcagaggttgcagtgagccaaggttgcaccactgcactccagccttggtgacagagtaagactccatctcaaaaataaaaaagaaattataataacaatttttctgttcataaatatcccttcaggtgtagacatgagaagttacaacaatataaagaaatagcctaaataaagcctaagattttgggcatatctatttattgtaccaaccatatgatgcataattcaattatttatctgggtgctagtctagactaaaagtttctagatggtaggaaccatgactgcttcatggatttttttaaatggccatatgaaatggaagcaactagtttatctatttgggtctccggattttctccttttgtatcatccaagtaccaggaaaccggagaaactctcatctgggtaccaaccaaagacacctcttgtatgaggggatgaactaacaggatgactcatttctctcacactgagacagaaggagaattaaccattcttgtcagcctgacataattccgctcaggacatcctcaaatgcctcaaaggcacctagatgattgtgagagaattctcggtgaccaggggctaatgtcccaatgataaaccaggctggagagactcaggctgattctaaatagaaaatggaactgtcctggtggagctccagaacctagatcacctattctaatttgctagctccatggtataaaatatttttttggaacttcttaaattttttcaactcttggacatctgaattttgcatactgtatgcacttgaaagaatgtttatgggtgaaaatgcagaagagggaaatatgttataaaaaatccatgaatgaacaatacctatgcaacagaatagagagcccagaaataatgccaccctcctacaacgattagatttttgccaaagctgacaagaggaatgtgggaagaattctctatttcataaatggagttggaataactacctagcactatgcagaagactgaaactggacctcttcattacaccatatacaaaactcaactcaaaataaattaaagacttaaatgtaaaatttaaaattataagacaccctgcaagataacctaagaaataccattctagacatagaaactgggaaaaccttcatgatgagtctatcaaaagcaattgccacaaaagcaaaaatggacaaaagggacctatttaaactaaagagcttcttcacagcaaaggaaactatcaacagagtaaacagacaacatacagaataaagaaaatatttgcaaacattgcctctgacagaggactaatatccagaatttattaagagctcaaacaagtttacaagaaaaaaaacaaataacctcattaaaagtagaaaagaaaaacatgaacatattcttttcaaaagaagacaaatgtgcagttaacaagcatgtgaaaaaaatgctcattgctaattattagagaaattaaaagaaaaaccacaatgagataccgcatcacacccatcagaatggctatttttaaaaagtcaaaaaataatagatgctggcaaggttgcagagaaaagggaatgcttatactctgctggtgagagtgtaaattagttcaacaactgtaaaaagcagtgtggcgattcctcacagaactagaaacagaattatcatttgacccagcaacctcataattgggtatatacccaaagaaatataaattattatattacaaagacacatctatatgcatgttcactgtagcactattcacaatagcaaagacacggacaggcactaaatgcctaccaatgatagactagataaagaaaatatggtatggtcagatgttgtggctcatgcctataatcccagcactttgggaggccatggcaggtgggttgcctgagcttagaagtttgagaccagcctgggcaacaagacaaaatcttgtctccccggaaaaaaaaaatatataaaattgcccagttatggtaatgcacgtatgtagtcccagctacaagggaagatgaggtaggagagaattgcttgagcctgggagattgtggctaaagtaagccaatatcatgccctggcactgtagcctaggcaataagcctgtctccaaaaataaaataaaataaaagatttagtaaaaacaaaatatggtatataaacattacaaaatactgggtagctatttaaaaaaaatcatgtcctttgcaataacatagatgaatctggagaccattattcttagaaaatgaatgcagaggctggacatggtggctcatgcctgtaatgctaacactttgggaggccgaggtgggcgaaccacctgaggttgggagtttgagactagcctgaccaacatggattaaccctgtctctactaaaaatacaaaattagctaggcatggtggtgcctgcctgtaaccccagctactggggaggctgaggcaggagaaccgcttgaacccaggatacgaatgttttgatgagccaagatgttaccatggctctccagcctggacaacaagagcaaaactccctttcaaaacaaacaaacaaaaaaacaacaaaaaaagaaaactaatgcggaaacacaaaaccaaatgcatgttataatttataaataagagctaagaagtaagaacacagaacacaaagagaagaacagacacaggcctagttgaggctggagggtagaaggactcagaagatcagaaaacataattgtttggtgctatgggtagtacctcagtgacaaaataatcggcacaccaaatccccatgacataattttagctgtataacaaacccacatgtgtacccggaaccaaaaataaaagctaaaagaaaaacaaatcccctctccctctccctccgcctccccctccctctccctctccgtctccgtctccctctccccagggtctccctctccctctctttccacggtctccctctgatgccgagccgaagctggactgtactgctgccatctcagctcactgcagcctccctgcctgattctcctgcctcagcctgccgagtgcctgtgattgcaggcgcgcgccgccacgcctgactggttttcgtgtttttttggtggagacggggtttcgctgtgttggccgggccggtctccagcccctaaccgcgagtgatccgccagcctcggcctcccgaggtgccgggattgcagacggagtctggttcactcagtgctcaatggtgcccaggctggagtgcagtggcgtgatcttggctcgctacaacctccacctcccagccgcctgccttggcttcccaaaatgccgagattgcagcctctgcccggtcgccaccccatctgggaagtgaggagcgtctctgcctggccgcccatcatctgggatgtgaggagcccttctgcctggctgcccagtctggaaagtgaggagcgtctctgcctggccaccatcccatctaggaagtgaggagcgcctcttcccggccgccatcacatctgggaagtgaggagcgtctctgcctggccacccatcgtctgagatgtggggagcgcctctgccccaccgccctgtctgggaagtgaggagcgtctccgcccggcagccaccccgtccgggagggaggtggggggggtcagccccccgcccggccagccgccccatccgggagggaggtgggggtcagccccccgcccggccagccgccccgtccgggagggaggtggggggggtcagcccccagcccggccagccaccccgtccgggaggtgaggggcgcctctgccaggccaccaccccgtctgggaggtgtacccaacagctcattgagaacgggccatgatgacaatggcggttttgtggaatagaaaggggggaaaggtgaggaaaagattgagaaatcggatggttgccgtgtctgtgtagaaagaagtatacatgggagacttcattttgatctgtactaagaaaaattcttctgccttgggattctgttgatctcttgaccttacccccaaccctgtgctctctgaaacatgtgctgtgtccactcagggttaaatggattaagggtggtgcaagatgtgctttgttaaacagatgcttgaaggcagcatgctcgttaagagtcatcaccactccctaatctcaagtacccagggacacaaacactgcggaaggccgcagggtcctctgcctaggaaaaccagagacctttgttcacttgtttatctgctgaccttccctccactattgtcctatgaccctgccaaatccccctctgcgagaaacacccaagaatgatcaataaaaaaaataaattaaaaaaaaaaagaaaaaaaatccccaggtgagagagagtgcaatgtcagtgaatggacagatttttgctacagatagttgaccaggtggggctgtactctgatttatttctgtgtgcatgcaggcagatgagattatgaaaaggagggccagaaccctaggctggtggagaaaacaggttgctgctgcagattcgatatccggggatgggaatatgcaaggaaacttgtagatacttttggctttttggctagaagtgcttggaccaaaaatgtcatggtgaagtcactgagggtggtgcctagtcctgggaggagtgtggacatgtcaatgtctagtgtgtgtgtttgggagtatgtgggaatcctgtggtggcagctgcaagaaaaggggatgtgtcatcagagctcctttcctgtaagttttcagtcctctgtcaccctgggagaagacctggaatcacaggacaatgggcagtgtgacaatctgtgtacaggagagcagaatctcccattcccaaacacccagagttttattccaggccaggcctccatgatatcttctttctggcaccaaatctgtagcatttgctgaacatcaaacaattctccaacaccaacttattgtataacatttgatttctaacactacccagagtcagcacagaccctgattcagggctcggtcccacaacattgttctcactgcagatgccagtcataaatcccatgggcccatctatggttctgagctactgtttaaaaactggggactcccataacttccctgaagctcagtaatttggtagagctactcacagaactcagcaaaacactgtagttatgcttactggtttaatatataagatgcagcccaggaaaagccaagtggaagaaatgcatagaacaaagaaaagagatgaggaaagatgaaacacatagataattatgaaaaatatttgtgattaataaaattctccttcctttgtgtgcttcaggaacagtttatggaaagaaacactcttcccgttatgattaagatgatgctcccttttcttgcctatcacacagccagacatacactctgcacattttctcctttttctcattaaaaaaaaaacaaaaaaccagctgaatttgccttcagcagtcaaaatcaattatgattttttttttttttgagatggagtgtcactctgtcacccaggctggagtgtagtggggccatctcggctcacttcagctttcacctccagggctcaagcaattttcctacctcagcctcccaagtatctgggattacaggcacctgccacaacgcccagctaatttttgtatttttagtagacagggtttcaccatgttggccaggctggtcttgaactcctgacctctggtgatccgcctgcctcagcctcccaaagtgctgggattgcagacttgagccaccacacccagcctaaaataaaatatttcttaatcaaattttacttaagtttatcttctctcaggctcctgaaattcaagctaccctcagtctgagtcaacatacaaccccattttatgtccctcctaagaacatgctgatttcagggtaagccattctctgatctaaaatctgactttttcaccctccatttgctgttcctctcccacctcctttctaatcttgtttgctcttccctagaaaagaaagcccttttctgcctatatttttgcaagccataaagatattatagttatttggtgcttccttttgttgcaatacttttttggaattggttttttacctgcctcttgagaatatgcctttaagggtgtcagtaccacatgtttacctgcaagcatgacatcaactggcagaaaagacagaaaaagtccatccatttctgtcccttaaagcagaaggtatttgggaacaatgtgctgctccataaagataaaaatatgtttcttcttccctgtcctcaggtgccctcccctgccacagacaccagcaatttctgctacagaacctgcagagaaaaagagaagaaattaaaatgctgggccctttttctaaatcctggaaattagtattaaatccttagtaccagctcccagggtgttatgaggattaaattatataatgtattatgcccagcagagttctctgtatcacaatcttgagcacatagtacctgcttcatacagtaatacaaatatacaccactctgacctgtccataccaagccaaaacagaacaggccctgtggctaccctttagtccaaaagtggaacttaattctcatgaatatattttgaaggcctcatacctgattctggcctcaccttagagtcacatgaggcccttcattaaaacaacatggatgttttcaaccagaataataaacagaagctgtggtgagggtacaagagatttctgcatattggccatgtgatcctaatgagaagcctgggctgataaccactaagctaagcattgcctctcaagctttaatgagcttataattcacttggtaattctggccacactttaagtaatgtgattctgcaggtttgaaaagggtctgtgaatcagtgttttaaacaagtcccctgtcaatgctgatgttactcctccttggctcattattaacattagttagaaaagcaggcaaaccacagggtcccttacacttagcactgttgtcacaatcagataactctggtacaaataaggacaactcatctccatcctaaagttttatattctttgctggctctttaaagtttacagaagaaacagaaggtaattaccaggatttagaaaaagagccaagcattttaatttcttgtttttctgtcatcaaaaatttttaaaaattgtatagaataaaagctaagtatagacagatgaatgagacataaaaaggaagaggttagtttagagaaaattttattctgtttgtatttacttttttttgacttacggagcaactactggatctgcgggaataagaaacaagttgctaaatagaatgtctctgcatccaatggttttcatagaaaattaaaaaacggctgggtgcggtggctcatgcttgtaatcccagcactttgggaggcagaggcgggcggatcacgaggtcaggagatcgagaccatcctggctaacgtggtgaaaccccatctctactaaaaatacaaaaaattagctgggcgtggtggcgagcgcctgtagtcccagctactcggaggttgaggcaggagaatggcatgaacccgggaggcagagcttgcagtgagccgagatcgcgccactgcactccagcctgggcaacggagtgagactccgtctcaaaaaaaaaaaaaaaaaaaaagaaaatttaaaaatgaagaccctcaaatacatactttatttttttgtatttatctgcttttggatttcaggaaattgtgagcagcagctctagaaatactgcaggattcaccagccaaaactgatctctgccaatcagttctgtgaggcaagactccagggtaggtctggacctacataaagcctccaaaaaaggtgaatctgaacaggtctggggcagagtgaggatcctttgtagaattctgttctctatgccactgggatacttccagttttgtttttctaagcctacctaaaagaaacttaaatcccagagtttctgtaattttaatattttctagccacggccctgtcaactttatactatatactaatatgcaatttaaagaaatcccttcaggtttcctagggtaattttattggaaaataaatatgtacagttagcaaggtaaaagaaatagaaactatacggctgggtgcagtggctaagtcccacaattccagcactttgaaaggctgaggtgggtggatcatgagggcaggagttcaagaccagcctgaccaagatggtgaaaccttgcctctactaaaaatacaaaaattagctgggcatcgtggctgtggccagtaatctcagctacttgggaggctgaggcaggagaatggcttgaacccgagtggcagaaattacagtaagccaagatcgtgccactgcactccagcctggggaactgagattctgtctaaaaaaaaaacaacaaaactataataattgttcggttcataaatatattcaggtgtagatatcagaagtcacaacagcataaagtggcataaataaagcccaagactttggacacatctatatattccaccaaccatatgatgcataattcaattattcatgaagttgctagtctagactaaaagtttctggattgtaggaacaatgactgcttcatgtatttttttaatggccatataaaatggaagtaatgagtttatctatttgggtctccaggtctccttatttatcatccaagtaccagaaaactggataaactctcatctgagtaccaaccaaagatacctcttgtatgagaggatgaacaaaaacacaggatgactgatttctcttacaccgagacagaagcagaattaatcactcttgtcaacctgacacaactctgctctggatattcccaaatgcctcaaagacacctaggtgattgtgagagaattcccagtgaccatgggctgatgtctcaataagccaggctggagagactcaatgataagccaggctggagagactcaatgataagccaggctggagagactcaggctgactctaagtagaaaatggaactgccttggtggagctcaagaacctggatcacccattctgatttgctagcatttgggtaagagaaagaatgaaaatattctactccagtatcacattttacaggtaaatatagttgtgcacatggctctggctattttgtggacttgatgtctcactcctaagatgtttatttacacttacagattctaccatcagattctatttcctcctggacactcttacagtctgacccttttttgtaaaccccaggcagaagccataccttatctgcagattctaggtaggacccacctggttctgcatcctttggtgttacagcaagtggagtacaatcagagaagagatcccctaatagaggctgctctagcactttctaagtattaagcctacatgaaaaaaaaaaaaaagctgacacaacatgaatgtaagtagacagtttatttgggtgaagtttaaggattataacctgggagcaaagactgaagttgcctagaatctacactttcattaacagcagttgcaagaggagttgtgaagacaaaaacaaagggacagagagtgggctgatagagttgtcagaaatttttatttaaagaagtaacattggttattgattggacatatatcattatggtttagggtatgagatacagtgtccaatgtggtattatcagtttaatatacatctacttgtggcaatagtgaacagtttcaagagatgaatacatatttcaaaggaggagaaaggcgtaactgcactttcatttcaatgtctgagtttgataaccaaaaggacttgcatttttagataaaaattttctatttcccaaatctcaagacctagatacaaaatgtagagctgcagatttagggcccgaatggctggagtagcagcaggtgttacctgcacatttgtgaacattttaccaagagaaaaaaggggaaagtgaagattctcatgtctgaatgtgtactcaatgaaaacgttactctgattaggtttgtgggccccatggtctctgaatcagtttaaggtctgaagatacaagagtcattgagataaaactattgattgttgccctgtgaagttggtagaaatttggtttagtctctctagaagtgactgtagaggactatagataccaaataggcagaaacacagttctgcttgcatatttaggggacagcatgcactttgttgcacaagtgtgagttgactggaagtctgagagggaaagtcccctctagagtaaattccagttggcaccttatgtgtttatatcatgtctggtaattatagacagtgtttggaaataacaaaagaatgttctccagccccagaaaaactccacaatagaacagaaagaaaactgttttatgtgacatgcatcatagtcaatctgcttaagagactgcagagacagaaagatggtcaccaaaattagtccacaagtagaatttccagaaccatgtcatacatagttcatcctaaattcacatggagattgaagaggccatctgtatatgctaattgtttatattcaataacaaaaaaacttttcacaccttcataacaggaggtagtttagcagcttgaagccaggtacttgctgaaggtaggttttcactctgctacaaaaatggttgaaaagcattctatccttttggctatttacattttacagcagtggctctgtgttccatggcattgggctacagcactttcttgctttttcctggttgctagtgtcctcttgacctctctcatctgccactgagggacagccttgagcacagctcagtttatgtgaaccacatttcccacagcagcactctagtgtcacatcagagaggaaagcctgagctgcaggagagcctgcaggccttgtgagtagaattgcactttcacaataatgggaatgtgaccagtgtttcagcccgtttttaattatcatggtgacatggaaaaaaaatcggatgaatttccagcatgagtccagatagagatatctacaaaagttctcactgtgacagcctacctcattcagacaccatgggatactaatagggcttctgaaacagacacccaaagtattggagagaaaaacagatctccatctgagcaagataattttgagagaaaaaagttaaaaagatcttgagaaaaaagatcttgagaaaaagctcagtttagatataagattgatcaagtcagccagaaaatagtcccctaaaagcaatttctctctaaccacccaaagtgcacaattactctcagcatgagaaacatgagcattatgaagaaagggggcagaatttcagaagaattttataaagctttttttcccatctctgctgctctctcatctcctagtcattgaatgggggttctatattgaaatatatctgacaacttccaacaacactttttgatgcagaaatagaatctgactgtgttcacattgtggagtatattagaacttccaacatagttaactgaagagctatcatggtttttgggtggccacatcaactgtctttatttcatttgtaatagcagcattccaattgagtgaaataaaagatactaaaattgtgtttacttataattatccctattgaataaagtaataaacatgtcagactagtattgactgtaacaatttggtagtaaattttttggggtattagattaaatatctaagtataaataattttaataaactagtagtaatgtatatggcagttaaaaagtttaactatacttcagttaaaatagtttatatttcaaaagtgtaaataacaatattaaaataaccatttaagtgattcattcaaagtaagtattgtggctttatattcatactattgtaaaaaatactgtttatggctcatgcctataatcccagcactttgggagactgaggtgtgtggatcacctgaggtcaagagttcacaatcaagctggccaacacggtgataccccatctctactaaaaatacaaaaacttagccaggcatggtggggtgtgcctgtaatcccagctactcaggaggctgaggcaggagaaatcacttgagcctgggtcccagtggttgcagtgagcagaacacgcccctacactccagcctgggcaagagtgagactctgtctcaaagaaaaattaaaaaaaaagaaaaagaaaactgtttaatgtatatgaatgtattgttatgtgtagtgtctgcaaacactacacataactatgctaattgttctgaagtcatcaatagaaagccaagtacaactacagactctactgttcagtttatgcactgaactctttttgtttttgctgtgtaagtacttcagcctgcaaatgttggataattaccttggataataaagttactttcaaagaaacttagtatcttttagcgtttctcattccatattgctaaatttaatcctatgtttctgctaagcttctgtgtgctcttaaaatgagcttttatctaaacacatttgtgtttactttaaaggactaaaaatgggccaggcatggtggttcatgcctgtaatcccagcactttgggaggctgaggcgggcagatcacttgagtttgggaatttgagaccagcctgaggaatatggagaaaccccgtttctactaaaaaaacaaaattagttgggtatggtggcacgtgactgtaatcccaactactcgggaggctgaggccagagaatcccttgaacctgggaggtggaggttttggtgagtcaagatcatgccattgcactccagcctgggcaacaaaactgaaactccatccaaaaaaaaaaaaagtcctaaaaaggagagaaacaaactttttaaaattagaaataaaccaataaatcagatgtactagaaaagataatctaaagtaaaaaaaaaaaaaaaaaaaaagacaaagtttatttaactgttaatatggtttacagatatttcaagaaagcagagaaaaatatctacacataatctaaatcccttaaggaaaaagagaataagaaaaatttttttggaactttttaaaaagtctttgaactcttggtaatctaagttttgcaaacaggatgcacttgaaagaatgttagcctaggtgtggtggctaacacctgtaatcccagcactttgggaggttgaggcaagcagatcacctgaggttgggagttggagaccagcctgaccagcaaggagaaaccctgtctctactaaaaatacaaaattggctgggcatgatagcatatgcctgtaatctcaactacatgggaggctgaggcaggagaattgcttcaactcaggaggtggaggttgtggtgagccaagatcatgccattgcacttcagcctggcaatagcgaaactccctctccaaaaaaaaaaaaaaaaaatgtttatggggggaaaagcagaagagagaaagatgttataaaaaattcatgtgcacaagaccaatgcaacagaacagagagcccagaaataatgccaccctcttgcaaccatcagatttttgacaaagctgacaaaagaaatgtggggaaaattctctatttaataaatggtgccggaataactaactagtaatatgtagaacacttaaactgaaccccttaattacaccacatacaaaaatcaactcaagaaaaattaaagacttaaatgtaaaacataaaattataagaaaccctgcaagataacataaaagctaccattctagacatagaaacctgcaaacacttcatgatgaagctaccaaaagcaattgcaacaaaagcaaaagctgacaaatgggacctatttaaactaaagagattcttcacagcaaaggaaactatcaacagagtaagcagacaacctacagaataaaagaaaatatttgcaaactttgcctctgacaaaggtctaatatccagaattaatgagaacttaaacaagtttacaagaaaaaaccaaacctcattaaaaagtgggcaaaaaacatgaacagatgcttttcaaaggaagacatacatgtggctaacaagcatatgaaaaacaaagctcaatggtaatcattaaagaaattaaaaagaagccaggcacggtgtctcacacctgtaatcccagcacattgggaggcttaagcaggcagatcacaaggtgaggagttcaagaccagcctgtccaatatggtgaaaccttgtctctaataaaaaaacaaaaattagcctggcatggtggtgggcacctgtagtcccagctagtcaggaggctgatagaggagaatcacttaaacctgggaggtggaggttgcaatgagctgagatcgtgccactgctctccagcctgggtgacagagccaggctccatctcaaaaaaataaacaaataaattaaaagaaaaaccacaatgagataccacttcacatcagtcagaatggctattttaaaaaagtcaaaaaataacagatgctaccaaggttgcagagaaaagagaatgcttatactctgctggtgggagtgtaaattagtttaactgtaaaaagcagtgtggcaattcctcacagaactgaaaacagaattatcatttgactcaggaacctgataattgggtatataccaaaagaaatataaattattataaagacgcatccatatgcatgctatgcatgttcattgcagcactattcacagtagcaaagacatggacaggacctaaatgcccatcaataaagaaaatatggtatggtcagaagcggtggctcatgccttcaatcctagagctttggaaggccaaggcaggtggactgcctgagcttagaagtttgaaaccagcctgaaaaaaatagcaaaatcttgtctacatggaaaatacaaaaagaaaaagtggccagccatagtaacgcacacgtgtagtcccagctacttgagaagatgaggtaagggagaattgcttgagcctgggaggctgagactaaagtaagccaaaatcacaccatggtaatctagcctgggcaataagtgagaccctgcatccaaagataaaataaaataaaagatgtagtaaaaaacaaaatatggcacataatcatggaatactccatggccattaaaaaaaatcatgtcctctgcaataacatcaatgaaacccattaaaaaaaatcagctctgatcttagttttttcttgccttctgctagcttttgaatgtgtttgctcttgcgtctctagttcttttaattgtgatgttagggtgtcaattttagatctttcctgctttctcttgtggacatttagtgctatatatttccctctacatactgctttaaatgtgtcccagagattctggttatgttctgtctttgttctcattggtttcaaagaacatctttatttctgccttcatttcattatgtacccagtagtcattcaggagcaggttgttcagtttccatgtagttgagcagttttgagtgagtttcttaatcctgagttctagtttgattgcactgtggtctgagagatagtttgttatactttctgttcttttacacttgctgaggagtgctttacttccaattatgtggtcaattttggagtaagtgcaatgtggtgctgagaatgtatattctgttgattttgggtggagagttctgtagatgtctattaggtctggctggtgcagagctgagttcaattcctggatatccttgttaactttctgtctcattgatctgtctaatgttgacagtggggtgttaaagtctcccattatcattgtgtgcgagtcttagtctctttgtaggtctctaagggctttctttattaatctgggtgctcctgtattgggtgcatatatatttagtatagttagctcttcttgttgaattgatgcctttaccattatgtcatggccttctttgtcttttatgatctttgttggtttaaagtcttgtttttctcagagactaggattgcaacccctgctttttttttttgttttccatttgcttcagagaccttcctccgtccctttattttcagcctatgtgtgtctctgcacatgagatggatctcctgaatacagcacactggtgggtcttgactctttttttttttttgagatgggtctctgttgcccaggctggagtacagaggcatgatcttggctcactgcaagctctgcctcccaggttcatgccattctcctgcctcagcctcccaagtgcctgggactacaggtgcctgccaccatgcctggctaattttttgtatttttactagagatggggtttcactgtgttagccaggatagtctcgatctcctgacctcgtgatctgcccacttcagcctcacaaagtggtgggattacaggtgtgagccactgcacctgccagggtctgggccctttatccaatttgccagtctgtgtcttttaattggagcatttagcccatttacatttaaggttaatattgttatgtgtgaatttggtcctgtcattatgttagctagttattttacttgttagttgatgcagtttcttcctaacattgatggtgtttacgatttggcatgtttttgcagtgactggtaccagttgttcctctccatgtttagtgcttccttcaggagctcttgtaaggcaggcctggtggtgacaaaatctctcaggatttgtttgtccgtaaaggattttatttctccttcactgatgaagcttaggttggctggatatgaaattctgggttgaaaattcttttctttaagaatgttgaatattggcccccactctcttctagcttgtagagtttctgccgagagatccactgttagtctgatgggcttccctttgtgggtaacccgacctttctctctggctgcccttaacattttttccttcatttcaactttggtgaatctgacaattatgtgtcttggagttgctcttctcgaagagtatctttgtggcgttctctgtatttcctgaatttgaatgtcggcctgccttgctaggttggggaagttctcctggataatatcctgcagagtgttttccaacttggttctattctccccatcactttcaggtacaccaatcagacgtagatttggtcttttcacatagtcccatatttcttggaggctttgttcatttctttttattattttatctctaaacttctcttcttgcttcatttcattcattttaacaatcactgatactttttcttcctgttgatcacattggatactcaagcttctgcattcatcacgtagtttttgggccatggttttcagctctatcaggtcatttaaggtcttctctacactgtctattatagttagccattcatctaatcttttttcaaggtttccagcttctttatgatggattcgaacatcctcctttagcttggagaagtttgtttttactgattgtctgaagaactgaaggagagagagagacacaaaagaaccttcaaaaaaaatcaatgaatccaggagctggtttcttgaaaagatcaacaaaagtaatagactgctagccaaagtaataagaaaagagagaagaatcaaatagacgcaataaaaaatgataaaggggatatcaccactgatcccacagaaatacaaactaccatcagagaatgaatactataaacatctctacacaaataaactagaaaatctagaagaaatggataaattcctggacacataccccctcccaagactaaacaaggaagaagttgaatccctgaatagaccaataacaggctctgaaactgaggatataattaatagcccaccaaccaaaaaaagtccaggaccagacagattcacagctgaattctaccagaggtacaaagaggagctggtaccattccttctgaaactatttcaatcaatagagaaagaaggaatcctcccaaactcattttatgaggccagcatcatcctgattccaaagcctggcagagacacaacaaaaaaagagaattttagaccaatatccctcatgaacattgatgcaaaaatcctcaataaaatattggcaaactgaatccagcagcgcatcaaaaagcttatccaccatgatcaagttggctttatccctgggatgcaaggctggttcaacatacgcaaatcaataaacgtaatccatcatgtaaacagaaccaaagacaaaaaccacatgattatcaatagatgcagaaaaggcctttgacaaaattcaacagcacttcatgctaaaaactctcaaactaggtattgatgggacgtatctcaaaataataagagctacaaaccactgctcaatgaaataaaagaggacacaaacaaatggaagaacattccatgcttatggataggaagaatcaatatcatgaaaatggccatactcctcaaggtaatttatagattcaatgccatccccatcaagctaccaatgactttcttcacagaattggaaaaaactactttaaagttcatatggaaccaaaacagagcccatattgccaagacaatcctaagccaaaagaacaaagctggaggcatcaccatatttgacttcaaactatactacaaggctacagtaatcaaaacagcctggtgttggtaccaaaagagatatagaccaatggaacagaacagagccctcagaaataataccacacatctacaactatctgatctttgacaaacctgacaaaaacaagaaatggggaaaggattcccgatttaataaatggtgctgggaaaactagatagccatatgtagaaagctggaactggatcccttccttacaccttatacaaaaattaattcaagatggattaaagacttaaatgttagacctaaaaccataaaaaccctagaagaaaatctaggcaataccattcaggacataggcatggacaaggacttcatgactaaaacaccaaaagcaatggcaacaaaagccaaaattgacaaatgggatctaattaaactcaagagcttctgcacagcaaaagaaactaccatcagagtgaacaggtaacctacagaatgggagaaaatttttacaatctacccatctgacaaagggctaatatccagaatctacagagaacttaaacagatttacaagaaaaaatcaaacaaccctaacaaaaagtcggcaaaggatatgaacagacacttctcaaaagaagacatttatgcagccaacagacacaagaaaaaatgctcatcatcactagccatcagagaaatgcaaatcaaaaccacaatgagataccatctcacaccagttagaatggctatcattaaaaagtcaggaaacaacaggtgctggagaggatgtggagaactaggaacacttttacactgtttgtgggactgtaaactagttcaaacattgtggaagacagtgtggtgattccccaaggatctagaactagaaataccatttgacccagccattccattactgagtatatacccaaaggattataaatcatgctgctataaagacacatgcacacgtatgtttattgtggcactattcacaatagcaaagacttggaaccaacccaagtgtccatcaatgatagacaggattaagaaaatgtggcacatatacactatgcagccataaaaaaggatgagttcgtgtcctttgtagggacatgaatgaagctagaaaccatcattctgagcaaactatcacaaggacagaaaaccacatgttctcactcataggtgggaattgaacaatgagaacacttggacacagggtggggaacatcacacaccccggcctgtcatgggtgtgtgatggagcagagagggatagaattaggatatacctcatatgaataatgagttaatgggtgcagcacaccaacatggcacatgtatacatatgtaacaaaccagcatgttgtgcacatgcacctagaacttaaagtataataataataataaaaaattaataagtaaaaaaaaaatgaggtctttgcaataacatcaaggcacggtggctcacgcctgtaatcccagcactttggaagaatgagatgggtggatcacctaaggttgggagtttcagaccatcctgaccaacatggagaaaccaaatctctactaaaaatacaaaattagccaggcgttgtggtgcgtacctgtaatcccagctactcggaaggctgaggcaggagaatcccttgaacctaagaggtggaagttgtggttagcggagatcacgctgttgcactcaagcctgggcaacaagagtgaaactctgtctcaaaaaacaaaaacaaaaacaaaaaacaaaccaaaccaaaaagaaaactaatgaagaaaaagaaaaccaaatgcttgttattatttataagaggtaaataataataacacatgaacacaaacaacagacactgaggactagtttagggtggaccctgcaaggactcagaggatcagaaaacatacctgtttggtgctatgggtagtacctcagggacaaaataatctgcacaccaaacccccgtgacacaattttagctgtataacaaacccacatgtgtaccccgaaacaaaaattaaagctaaaagaaaaaaaaaaatcccagggtgggagagtgcaatgtaggtgaaaggactgatttttgctacagatagtggtcccagtggggctgtactgatttatttctgtgtgcatgcatgcagatgagattatgaacaggtggtccagaaccctagtttggtagagaaaacaggttgctgcagcagatttacagtctgaggggatgtaccaggagacttgttttttggcaaaaaacacttggatcaaaaacgccatggtgaagttcctgaggggggtgcctagtcctgggaggagtgtggacacatcaatatctagtgtgtgtgtttgtgagtgggtgggaatcctgtggtagcagctgtgtgaaaagggggtctgtcatcagagctcctttcctctaagttttcaggcctctgtcacccttggagaagacctggaatcacaggacaatgggcagtgtgactgcctgtgtacaggagagcagtctctcattcccaaacacccagagttttattccaggcaaggactctgtcatatcttatttctggcactaaatctgtagtttgctgaacatcaaaaaattctccaacaatttattgtctaacatttgaattctgacactacccacagtcagaacagactctgattcagggctcgggtcccaacattgtcctcactgcagatgccaatcacaaaccccatgggcccatgtatgcttctgagctaatgtttaatatttggggctgccatgacctccctgaagttgaataattttgtatagccactcacagtactcagcgaaacactgtagttatgtttaccagtttcatatataagatgcagcccaggaaaagccaaatggaagaaatgcatagaacaaagaaaagtgatggggaacgatgaaatgcatagataatgctggaaaatatttgtgattaatacaattctccatcctatatgtgctccaagaacagtttatggaaagaaacactcttcccattacaacttagacggtgctcccttttcttacctgtcacagagccagacacacactctgcacattttctcctttttctcattaaaaaaatcagctgaatttgtcttcagtggtaaaaataaaatatttctgtctttttcttgagctggaatctcgctctgtcacccacgcagaagtgcagtggtgtgatcttggctcactgcaacatctgcatcccgggttcaagaaattctcctgcctcagcctcccgagtagctgggattataggcacccaccaccatgcccggctaatttttgtattttaagtagaaacagggtttcaccatgttgcctaggctggtctcaaacttgtgacctctggtgatctgcatgccttggcctcctgaaatgctgggattccaggtgagccaccatgccaggcttaaaataaaatatctccttttttttttgagttggagtattgctctgttgcctaggctggagtgcaatggcatgatctcagctcaatgcaaactctgcatcccaggttcaagctattctcctgccttagcctcctgagtagcaggcattacaggcacgtgcccccgcaggtggctaatttttgtatttttagcagagacaaggtttcaccatctcaggctggtctcgcactcctgaccttgtgatctggaattacagacataagccaccacacccagcctaaaagtaaatacttcttaaactttacttaagcttatctccctccctcaggctcctgaactttgagctaccctcagtctgagtcaacatacaaccccattttatgtccctcctaagaatatgctgatttcagggtaagacattctcttttctataatctgactttttcaccctccatttgccattcctctcccacctcctttctaatcttgtttgctcctccctagaaaagaaagctcttttctgcctacatctatgcaagccgtaaagatcttatagttagttggtacttcctcctgttgcaatacatttttgaaattcattttttttacataaatctaacatttgtattacacaaagtgtagaaggtgcctcaaaacaataacaacttcatcatcattagtaagaccgtcccccagtttcctttcattttaaccttaactgcatctgcctgtggggccccagctttccagggctctgcagtttctctgaggatgaaggctccttccatggctcgggtgagcaggctgaaacatctgcaggaaaggttccccaagaataactaactgggcctttaataacctcctgttgcaggcttaatattagccttagcttggagtcacaaggttcaagctttaatttccatgtgagagttatttacttggtttttgaaactgttcaaaaaatccagtgaaattactcaaacactgtgtttatataagggatggaaattttaaggtgcttaattttttttttgagatggagtcttgccctgtcacccaggctggagtgccatggtatgatctcagctcactgcaacctctgcttcccgagttcaagtcattctcctccctcagcctcccaagcagctgaaactacaaagtatgcgccaccataccctattaatttttgtatttttagtagagatggaatttcactatgttgggaaggctggtgtggaactcctgacctcaagtgatctacctgcctcggcctcccaaaatgctgggattacaggcatgagtcactgcacctggctaaagtgcttgcattttataccttcataagaaaagcaaatatacctacttctttcagacaatatatgtattatcttattatttctattaaaaataatgtagtaacaaattagtcatatgggaacacttgtagaaggtaccatgtttcatcacatataatttagcattacattcagaaatgaagacaacaggatatagacatgagatatttattcactgtcacaaatttacccagcaaaaggaggtactgatgttttgatgaatttatgtaactcaattatctacaacattttcctgtggaaatatattcattgtctacagccaaaatgaaagagagatttttcttattttttcccttggtagctagcattcttaaagttaaggcttggaattctgtttgaaatcactcagccataaaaaacacacctgagaaaattcctaaactcactctgggaaagaaaaagataaatgagaatgattaacaaatggaatatatgattagatattaattttttgaaactcatattttattttctttgtaaatattttcttaactttcaagccctactaataaaatgcaaattttagttaaaaaaacatgtcagctgggtgcagtggctcacgcctgtaatcccagcactttgggaggccaaggcaggtggatcacttaagactagaagtttgggaccagcctagtccatctctactaaaaatacaaaaactagctgggcctagtggtgcgcacctgtagtcctagctacttgggaggctgaggccatgagaatcaattgaacccaggaggtggaggttgcagtgagccgagattgagccattgcattccagcctgtgcaacagattgagactgtctcaaaaaagaaaaaaaaaaagggaggtcaaaataagtgaacagatcgtttcaaggtacaggtcgaatcacccaccccatcctgctcatttacgtgctcaataaccaccctcccaggagacactgcgatatgacccagtgagtcctccaggtgcattttacttcctaaatttttacgccatctcactggggtcagttttttttgtcttttggagtgttttttttttaaacaaatttttcactatttttctgccaccccccccctgcccccgccaagaaaatctaggggacagaaattatttgttttcccctcgataccagcatctggttggctgacaagcaatgtgtctccaagaattggaagctaggttgggtgaagagaatcatgtctcaaggggttagcttttctttattttttgtgagatcgagtcttgctcttgtcgcccaggctggagtgcagtggcgcaatctcggctcactgaaacctccgcctaccgggttcacgccattctcctgcctcagcctcccgagtagctgggattacaggcgcctgccaccatgcccggctgattttttgtattttttagtagagatggggtttcaccatgttggccagcctccaggctggtctccaactcctgatctcaggtgacccacccacctcggcctcccaaagtgctgggattacaggcgtgagacactgcacccagcctcaaggggttagcttttcaggaaaaaaaaaaaaaaaagaaaaaagaagaagtgcaacaggagatgcctttcagccccaaggctgtcacctgctcttttgagaggctacactgtatacttcaggtggtcctatgggagaaaatgacccaagagctaatagtcactagacactctaccagacatagccatggtgggtatcttggtttattcccagaaagtactaaaactcaggcccagaaaaaaaactgaaggatagctgaggacacatcaccctacaaagtttacaaagggtaatcttgacccaaaaacattttggtaagttctctggaaaaataaaagaaaaagaggagccgggcgcggtggctcacgcctaaccccagcactttggaaggccaaggcgagtggatcacgaggtcaagagattgagaccatcctggcccacatggtgaaaccccgtctctgcttaaaatacaaaaatttagctgggcgtggtggcgcgcgcctgtagtcccagctactggaaaggctgaggcaggaggatcgctggaacccaggagacggaggttgcagtaaatcgagatcgcgcgactgcactccagcctggcaatagagccagattccatctcaaaaaacaaaaacaacaaaagaaatgcaggcacagatattttttacaatacagtgtcaggggattattctttgctttcttctgggaaatatttacaaagagaaaacaagtcttttcaatagtgttatgcaatgctttaaaaaaaatgattaattgaggaacgtggggtacatttcaggccctgcttaggacacatgtgaaaaatgctagggaaaaatcagtcccctgtggggtgtggaaataattaagtggcaggcaattagactgaggatgctctagtcctcggattcctccttctaaaataaaaatctaaactcaagtgcagtttttgctaaattactacattcgggaaacaaaattcaggcttaaaaaaccataaactgccaattaagctctgattacataaccaggaaatttccaccttaattgtacaaagaaactacataactatacgtattgaattattgaatatggttttcttcatcatgcaccttatcaatgtttccttcaagcccctcccatggaccgcaaactacaaactatagctgggtgctcttgaatgactgattaaattatttgatatttttgcggtgactcccataatttatgtatttatttatttttttagacaaagtcttaggccgggcgcggtggttcacgcctgtaatcccagcactttgggaggccaaggcgggcggatcacgaggtcaggagatggagaccatcctggttaacacagtgaaaccccgtctctactaaaaatacaaaaaattagccaggcaaggtggcgggcgcctgtagtcccagctactcgggaagctgaggcaggagaatggcgtgaaccccagggggcggagcctgcagtgggccgagatcgcgccactgtactccagcctgggcgacagcgagactccgtctcaaaaaaaaaaaaaaaaaaaaaaaggacaaagtcttgctctgtcacccaggctggaatgcagtggtgtgatatcagctcactgcagcctccgcctcctgggttcaagcgattctctctcctctgcctcccgagtagctgggactagagacattcgccatcacactcagctaatttttctattttctttgtagagatggggtttccccattttgcccaggctggtcttcaactcctgacctcaagtgatcagcccttctcagcctcccaaagtgttgggattactggcatttcgtacctggcaccatactttttttttttctttgagacggagtctccctctgtcgcccaggctggagtggtggtgcaatctcggctcaatgcaagctccacctcccggattccacacatttttaataacagaaaagagaaactgtgaaccccacggaccaaagctcttcccattcatgaacccacatcccgagtcaggattctcccctgacgaccctcccatggtccctgcaaaatctgggagaaacgcggcgctgccgctgcagagctgcctagaaagggctccaggccatggcacagtcactgcgagaggaagagacaggaggcctggcggcccggctgtcagcgcagtcgccatcttaaggctgaagggggctgaggccaacctgggcaaggagaacttggggcgcacattgtggagctgactgcgaagaggcctgagtcccgccacagtcacttcccaccagttccaccctgcccctcttcctgtctcgggatgtcggccgggcactctcaccatttctatgcttccagggtgtcctggggttttagctgtggatctcccaatacctgcaggtcacagggccacagaggctgggcctccaggagaataggacacagaccagtgaagacgagacctgaaacgccggctgcagctagagacaaaggccgcgccaaaagcggaaagccgtcctcgtcgctccagctgcgtgcctgattggacggtttccagcccagcgtctctgattggataatgctttaggtcccgcccctcaggccctgagtgacagaagatgtgatcagatgctgggctaagtgaagagagacagcctaagctgcagcctttacaggcagggcttccttcctgagctgacccaggccccccccagagcatgagaaaattctcttttgtactcactctccttttgaatgtattcaaaaggtgaacagaagtattttgctggcatattaataatacataaaatttttgttcaagagaaaatcaacgtttactttgttagtagtgtattatcaatactaaagctaatgtttttttttttttttttgagacggagtctcgctttgtcacccaggctggagtgcagtggcggggtctcgctcacccgattttcctgcctcagcctcctgagtagctgggattacagctactattgttgaaaaacaatagacaatcacaaaaacaagctgacctttttgtgttccttaagccctgtcctgaagagccctgtgactgggctttatgccaaacaactcgttactaaagagctgtggtcccagactgcaccgaagcttcatgagacctctcctcgtctgtgcacggacgagtggccaactctggagcccaggctgttgcttccctgtctggtggtgaatcctccacagtctgatgagggtggtgtctgactctggagctcaggctgttgcttcttggtctggtggtgagtccttcatagtctggtgagtgcgggtgtcccactctggaacccatgctgttgcttcctggcctggtggagaatcttccagcctggagagtgcggtgtctgactctggagcccaaggctggaaacttggggacgtcccaaatcccggaatggaaactcccccagttctcccccttggcgtgccctatctggtgagtttcgggggaactcatgacccaagtcataataggaatttcaagcctcataaagacatcatggttgaagcagaggtgtttcgtttccagcaaagcccaatagcaagctaacaattgctcctcgaaagggttataagctttgctggcctctggcagtttctgggtccaaaaccagaaatgtacctcttcccatcttgtttctgcctaaggctccaattagcatgttgatctaggacagttacttgcagttctacgggaccatcccaaatgggtcatagatccagggccagttgcactgcttgtttatcttgttcggaagccatgatctctttctctccccaaagtcatagcgttttctggtggctgcatgcagaggttgtaacatgttacccaagtggggaatatgatgtctccagaatccaaacaagccaataaatttctgagcctcatttttagtggtaggggttgcaaattctagtattttaggcttagcctttggtaaaatgaattatttccctgcatttcataggatgcaaccagcccctatcttgacacattatcttataagcagtaaggaaacaccatccactctgggagatcccctcagcgtctcctttgctgactggaattccctgcagcacttcacgcacaaaggtctaaattgcactaatttagattcccaattcttacaaagtccggttccccttgaccattcaattgccaagggagagaactgggggagtttccatccggggatatgggaagtcctcgagcctcccgccctgcccttgttgctaaaaagtggcacacttttgtttttgaatcctgtttgtgacaccaaaagtgttctgtgcgggaaacgcacgagggggagaaggaaagacacacacacaatacctttaagggtaaacaagcttcattccacgtaaatagcaatgcagatataataagcaaattatgtaataagcaaatcaatataataagcagattgatataacaagtagattgatataataagcaaattgcaatgggaagaggagaaaggaaaaaatatatatatatttacactcaccagactatggaggattcactaccagagtgggaagcaacagcctgggctctagcatcggacattgcactcaccagacagtggaggcctcaccaccagatgggaagcaacagcttgggctccagagtcggccgctcattcctgcacagatgagaagaggtctcatgaagcttcagcccagtctggtatcctagctcttttgtaactagttgtttcgcatgaggcctagtcacgagggcctttcatgacccggcacgaggaacataaaaatgtcaacttgtttttgcgattgcctattgtttttcaataactaatgcataggaatagattgaaatagagatttctccaaaacagcactgaatgaacgcttgaaggggctcacacaacctgttctgggactcggtgaccattgtttgtgtccacgttcaattgagttcaaatttattatttaacttttcctccacaaattcgcctgtcttgatgaatcagctctgtctaggcaaagggcaaggtgaacctcttgggccttacacaacctccacctcctgggttcaagcgattcttctgtttcggtctccagagtagctggcactacaaaagtgcaccaccacaacctgctaattttttgtatttttagtagagatggagtttcaccatgttggccaggctagtcttgaactcctgacctcaagtgatccacccacctaggcctcccaaagttctgggattacaggcgtgagccactgaggttatcactaaatgatatctttttgtttcctataacaatgtgaaattacttaaaggtggtttcaaattgaaaaaataaaaagaatgcagataaaaataaaatataaaaagttcaaaaaattacaagagattacaaaatatacatgtatatcttgagaggtcaaaaatgacaaattttgtttatttacaaggttgtatttatttatttatttatatttttattttttgagacaaaatattgctctgttgcccacgatggagtgcagcggtgcgatcttggctcaccgcaacctccacctcacgggttcaagcgattctcttgcctcagcttccctagtagctgggaccacaggctcataccaggaggcccggctaattttttttatgtttagtagagacggggtttcactgtattagccaggatggtctcgatttcctgaactcctgatccgaccgcctcagccttccaaagggccaggattataggtgtgagccactgcaccagctttataaggttttattaaaattggctttagtgttgataatacactattaacaagtaaaagttgattttctcttgaacaaaaattttatgtattattaatatgacagcacaatacttccgttcatcttttgaatacattcaaaaagagagacaatgaaaagagatagaattttcccatgctctggaatgggcctggctcagctcaggtaggaagccctgtttgaaaaggctgcagctaggccaggcccagcggttcacgcctttaatcccaggagtttgggaggccgaggtgggtggatcacctgaggtcggtagttcgagtccaggctgaccaacatggagaaaccctgtctttactaaaaatacaaaaaattaaccaggcatggtgccacatgcctgtaatcccagctacttgggaggatgagatctattatatctcacagggtttacaatttctcttttctcctattataaatttatgaggccagcggctgggcatggtgactcatgcctgtaatcccagcactttgggaggctgaggtgggcagatcacttgaggtcagaagttcaagaccagcctggacaatatggtgaagccccatctctactaaaaaaatacaaaaaaattagctgggcattgtggcgtgtgcctgtaatcccagctactcaggaggctgaggcaggagaattgcttgaacctgggaggtggaggttgcagtgagccaagatcgtgccactgcactccagcctgggcaacagagaaaaactccatctcaaaaacaaacaaaaaaaatttatggggccaggtgcagtggctcacacctgtaatcccagcactttaggtggtctaggcaggtggatcacttgaggtcaggagtttaagacaaacctggccaaaatggggaaaccccatctctactaaaaatacaaaaattagttgggtgtgatggtgaatgtctctagtccaggctactcaggaggtagaagtgagagaataacttgaacccaggagtggaggttgcagtgagctgagatcatgccactgtactccagcctgggcgacagagcaagactctgtctaaaaacaaaaaaacaaacaaaaaaacaaaaaaaagtatgagtgtctctgccaaaatggaaataatttaatcaaacagtgattcaagaattgtcgagcacccagctatagtttgtagtttgtggtccatgggaggagcttgaaggaaagacatttatagggtgcatgatgaagaaaactatattcaataattgctcaggtatggttatgtaggttcttaatttgttcaattaaggtggaaatttcctggttatgtaatcagagcttaattgacagtttatagttgcttaagcctgaattttgtttcccctaatgtaaaactttttttttttttgagacggagtctcactgtatagcccaggctggagtgcaatggcatgatctcggctcactgcaacctccgcctcccaggttcaagtgattctcctgcctcagcctcccaagtagctggaactacaggtgcatgccaccatgcccggctaattttttgtgtgtatttttagtagagatggggtttcaccatgttagccaggatggtcttgatcttctgacctcgtgattcacctgcctcggcctcccaaaatgctaggattacaggcatgagccgccacacccggccctacccctaatgtagtaattaaccaaaaaatgtccttgagtttagatttttttattttagaagtaggaatttgaggactacagcctcctcagtttatttgcctgccacataattattttcataccacataggggactgattttccatggcatttttcacatatgcctcaagggtaccccatgttcttcagttaatcattttaaaaaagcattggctaacactattgaaaagatttgttttctgtttgtaaatatttccagtgagaagaaaggaaagactaatcccctgacactgtaaggaaggagaccacctttctgcttgtctcaagcctcagaaaaagaaaagaggaagcaaaagctaaagaaagtcagaaatgagatcaatagttagacagctcctggccactccccagggctggtagttaaaaatcagctcctgacctaactgcttgtattatccatagatttcaggcattgtatgaggaagcattgtgaaattttctgttctgtccggattaccgatgcatacacgctcagttatgtaccccatgcttgctcaatcaatcatgaccctttcacgtggactcctttagagttgtaagcccttaaaagggacagaaatttctgtctcagggagccggcttttgagacgcaagtctcctgatgctcctggccgaataaagcctcttccttctttaacctggtgtctgaggagtttgtctgtggctcgtcctgctacatttcttggttccctgactgggaagtgaggtgattagtggttggtcaaggcagtcttttaggtgacttaggcctgtcctgtggagcatccccgtaggggactccagccagcctgagagacacggatcctgagagtgctcccaggtaggcaattgccctggtggaatgccttgtcagtgcagtgcatgggaggcccctgtggaggatcaatgcagtggctgaacactgggaaggaactggcaacttgagtctggacatctggaacatggtaagaccggtcttagaaacttgctcactccatttgaggggaagcatggcctgatcacccatgacgtgcctttatcggcattttggttttggttttgattttgtcttggcttaaattgcttggcaccatggttttggttttgattttgatacagtgtgaattaggcaagtgtgtgaccttttaccctttccttcttgtagtgtgagttttgtcttgtctctagagaaaaatgggtcagacacaaagtaagcctaccccacttggaactatgctgaaaaatttcaagaagggatttacaggagactatggggttaccatgacaccagagaaacttagatctttatgtgaaatagattggccagcattagaagtgggttggacatcagaaggaagcctggacaggtcccttgtttcaaaggtattgcacaagatatcttgtaagccaggatacccagaccagttcccgtacatagacacttggttacagctagttttagacccccccacagtggttgagaggacaggcagcagcagtgttagtggcaaaggacaggtagccaagaagaatcccactccacccatcgagggaagtcggttcctaaagttctgtctgaccccatatcagaagactcatggcaggaaatggcaccagtgatgcctcccccttatcgagatgagagacccccacttctgagcccacagcacctgtgcctccacaggacacacacacccctagaccacccagagtaaacaagagaggatgtgaagccatgggagaaacccctcccttggtggctcatttaggacctaagactggaacacagatgcccctgagggagcagtgatatactggagtagatgaggacaggcatgtggtaaaaagtcatgcctttgtgtatcaacctttcacctctgctgatctcctcaattggaagaacaataccccatcttatactgaaaagcctcaagctttgatttgctccaaactattatccagactcataaccctacttgggctgattgccaccaactgctcatgtacctctttaacacagatggaaggtgaagggtgctccaggcagcaactaagtggctggaggaacatgctctggccaattaccaaaatgtccaagagtatgtaaggttccaattaccaggaacagactcccagtgggacccaaatgaagggccagacatgaaaagactaaaatgatatagggaggccctcctagaagggttaaaaaagggagcccagaaggccacaaatgttaacaaagtctccgaggtcattcaaggaaaagaagagagtccagcacaattttatgagagactatgtgaggcatatcgtatgtatactccctttgattcagatagccctgaaaatcagtgcatgattaatgtggctttagttagtcaaagcgccgaagatattagaagaaagcttcagaaacagactgggtttgcaggtatgaacacttcagttattagaaatagccaatcaggcgtttgtgaatagagatgcgacgggtcgtagagaaagccgtaaagaaagtgagcgccaagcccggtgaaatgctgacctgccagccacagctattaaaggggttcccccaaagggctgaggaatgggggaccccggggaaaacacacagtctgactgaccacgtctgcagcgtaaccggtgtgcttactgtaaagaaagcaggtcatttgcaacctaccagaacctaagaccaggaggcaggtgagagagttcttaggagctgtggggatctgcaggttatggatcccaaactttgcagtactggccaaacctctgtaccaagtcacaaaggggggcatccaggaaacttttgaatgggggtctcaacagcagcaagccttccatgaattaaaagagtaactcatgtcagccccagccctgggtctgcctgacctgtcaaagccatttacactatatgtgtcagagagagaaaaaatggcaattggggttttgatccaggctgtggggccctggctaaggctggtggcctacctatctaaacaactggacagggtttctaaagtttggcccccgtgtttgagagccttagcagcaactgccctgctagcacaagaaacagataaattaactcttgggcaaaacctaaacataaaacacctcatgctgtggtgactttaatgaataccaaaggatatcattggctaacgaacgctagactaaccaagtaccaaagcttgctctgtaaaagtctctgcataaccattgaagtttgtaacagcctgaaccccaccaccctgctcccggtatcagagagccctgttgagcataactatatagaggtgttgcactcagtttgctcaggttagcaaacctgacctatgggaccagccttggacatcagtagacttggagttatatgtggatgggagcagcttcatcaacccacaaggagagaggtgtgcaggatatgcacctctggatgcttttattgaagccaaataattgcctccagggttcttcagcccaggaggccgaactcattgctttaacttgggccctagagctaagtgagactgtgaacatttacactgactctcgatatgcctttttaaccctccaagtgcataaagcattatataaagaaacaggcctgttaaactctgggggaaaagatataaagtatcagcaagaaatcttgcaattattagaggcagtgtggaagccccagaagatggcagtcacgcactgcagaggacaccagtgaactcctactacagttgctttagggaactcctgagtggactcggaggctcaaaaggcagcatccaccccttaccgggcatcaatcacagccccctttctccctcaagaacctgaacttttacctacctattctaagggagaaaaaaactttttccaagtggaagggggacaggtaataaaggaaggatggatccaggtatcggatgggagaatagctgtgccacagctacttggagcagaggttgtactggctgtgcatttaactacccatctaggtcaggaatcacttgaaaagttgttaggccggtatttttacatctcccatttatcagctcttgccaaaacagtagcgcagcgatgtgttatctgccgacagcacaatgcaagacagggtccagccgttctgccaggtatacagacatatggagcagccccctttgaagatctccaagtgaacttcacagaaatgccaaagcgtggaggtaataagtatttactagttctactctgtacctggtacctactctgggtgggtagaggcttatccaacatgaactgagaaagctcatgaggcaacccgtgtgcttcttcaagatcttattcccaggtttggactgcccttatggatcagcttggacaacaggccagcatgtgtggctgacttggtacagtaaacatcaaaggtataggagatcacatggacactgcatgcagcctaccaaccgcagagttcggaaaggtggagtggatgaatcagacaatcaaaaacagtttagggaaagtatgtcagaaaacaggattaaagcggtacttttaaccctggtactgttcaagattgatgcaacccttcaaagagaacaggatattctccctatgaaatattatatcataggccccttcctatattacagggactcccaggcactccacaagagttaggtgaaattgagttacagtgacagctacagctacaggccttaggaaatttactcaaacaatttcagcctgtgtaaatgagaggtgccccatcagcttattctccccaattcaccctttctccccaggtgattgagtgtggatcaaagattggaacacatcccccttgcgaccacggtggaaaggagcccagaccatcatcttgaccacccccccacagctgtaaaggtagaaggaatcccagcctggatccaccatagctgaataaaacctgcagcctctgaaacctgggaggtgagactgagcccagacaacccctgcaaagtgattctgagaagtgtttgtgtccctgggtacttgagattagggagtggtgatgactcttaaggagcatgctgccttcaagcatttgtttaacaaagcacatcttgcacagcccttaatccatttaaccctgagttgacacagcacatgtctcagggagcacagggctggggatagggttgcagattaaaatggagtctcttatgtctactttctatatggacacattaacaatctgatctctctttcttttccccacagaaaaatattcacaactcattctgtatgatgtaaatatagcactcaaaactgtatgtgttcttgttcatgccctcaattttatactttattatctagaaaaatatatatgaaccgatgtggcggatcttatgctgctcttttttctcagagttagagaatatattagagaatatttctgtgttgaaaactattttattggataattttagtcatcctataagtcagaaccagttctctttatgctcgcatttcaccttaagtcaaattgaaaattctgctcatggccatttaagtaaaggtgtgtgtgtgtgtgtttcagggaccactgcaatttagggatgtggccacagaattctctctggaggagtggcattgcctggacactgcacagtggaatttatatagggatgtgattttagagaaccacagaaacctggtcttccttggtgaggataacctgaatacataattcataatataccctaaagattttatttctctttttttgcagaatttttttagtaatttattcttttcataaaagagtttcagatccactttttccagaaaatcttcagaatttgttcatttagaaaagaatttcttcaagatgtttcatcttaatccagactttccacattcctgagttgagctgtattcttcactctaaattagtggtaattccagaaacttagtggcataaaatattgttgccccacctgaaaatctaattgccaccaccaatttttgattcagtagtaccagatagtaaaattaagaaaccggcatattgaaagtattcttccttcctttttttttctttctttctctttttctttctttctttctttctttctttctttctttctttctttctttctttctttctttctttctttccttctttgtttctttgtttctttctttctctttctttcttctttctttctctctctctttctctctttctttctttcttctttccttctttttttttccttttttttttttttttttttgaagagtttcactcttgttgcccaggctggagtgcaatggtatgatctccgctcaccacaacatccacttcctgggttcaagcaattctcttgcctcagcctcctgagtagctgggattagaggcctgtgccaccatgcccggctaattttttgtatttttagtagagatggggtttctctatgatggtaaggctggtcttgaactcctgacctcaggttatccaccacctcagcctcccaacgtgctaggattacaggtgtgagccactgcacctggctgaaagtattttctaaatatttataaatttctgttatgaattagtattttggtattaatttactagaatattttattatatctgctctgctgagcacatttagtaatgtgcttataattggagaatatgagcaagactcatgttatttatttttaataaaacaggtattgttgtcctaagccagacctgatcacctgtctggagcaaggaaaaaaacccttgactatgaagagacatgagatgattgccaaacccccaagtaggtgtgagtgaaaatgaatacaagagacgacagagataagaggtcccaaggtcaatgagaaagcaagtttttaaaatgtgattcaggaagctgtgttccaaaggaaatagttcctgggcagctgtgttatttgtttatttatttatttaattttgctcctacaaaggggcatcttctgtcttatgattttaaattctctaaggattccacttttcttttggtgagcttccttcaagttcacagtgagagccaaagtcctcttcatggcatataagagactgcacaggctgggcacattggctcatgcctgtaatctcagaactttgggaggctaaggcagtggatcacctgaggtcagaaattcgagattagcctgaccaacatggtgaaacctcgtctttactaaaaatacaaaaattagccaggggggttgttgggcacctataatcacagctacttgggaggctgaggccaaagaatcacttgaacccagaagacggagcttgccgtgagccaagatcgtgccattgcaccccagcctgggcaacagagtgagactccatcacaaaaaaacaaaacaagacaaacgaaaaagagactgcacaatctggctgcttttccattgttttgcagatatgcaaatatctatttgcattatttagagaaactaaaattatttttcatgttatctttttgcatcaggtctgatatgtgtgagagtaatagtttctgttgcacttttttgtttatttttttcagcacagtctattctgtttttattactataaagtcttgaaatatagtttgaaattataagtatgatatttttctgctttattccttttcctcaagattgctttggctattcaaagtttattttagtttcatgtaaattttagaattgtattttccagtactgtgaaaaaaatgccactgcaattttgataggaagtctattgaatctatagatcactttggataatatggtactttattaatatttattctttcaatccatagacaaaatattttaaaatttatttggatcttctttaattttttcattttttattgtaaagatttttacctccttggtcaatttttttctcagaaatttattacttaatgctacagcaaataagatttttttccctctattttgttagatagtttgttttaagtgtatgaaactgtagccaggcacggtggccaacgcctgtaattccagcactttgggagactgaggtgggtgtatcaactgaggtggggagttcgagaccagcctgaccaacgcggagaaaccctgtcgctactaaaaatacaaaaattagctgggtgtggtggtgcatgtcagtaatcccagctactcgggaggctgaggcaggagaatcacttgaacctaggaggtggaagttgcagttagtcaagatcacaccattgcactccaggttggtcaaaagagcaagactcctcaaaaaaaaaaaaaaaaagtgtatgaaaccctatatatacttgtatgttaattttgtattttgctaatttactgagtgtacttaatagtttagacagattttaatgtactgtttatggttttttatatacacaattgtatgatctacaaacagcaactttttactttttttatttcaatagtttttttatttctttgactaattcttctgccacatacttccagtgctacattaaaatagaagcactggccaggctctgtggctcacagctgtaatcccagcactttgggaggccgaagcgggtggatcacctgaggtcaggagtttgagaccagcctgaccaatatgatgaaaccccatctctactaaaaatacaaaaattagctgggtgtgtcgacatgagtctgtaatcccagcaactccagaggctgagacaggagaatcgcttgaggcaggaggcagaggttgcagtgagccgagatcacaccaatgcacttcagcctgggcaacaagagcaaaactgcatctcacacctacacacacacacacacaaaatagaagcattgacaatgctcacaatatagttttgtattggtgtctgaattcaatgcagcaaatacctcttcaagttttcacaaactgattttagaaggtaaagatcttttgttggcccttagggtgatgagatgccctctgaatttgtagtgaagaggggttgtagcttggtcacaaggctgctgggtctgcactagggtccacctttagttggcttgttacaggggctttggtagttgtaattctcattttatttttagacagactgaatatccttcaagactttgttccatagggcagacactagggcaggtttttgcagtcaggtctgcatatgctgggccttgtatcaggatgtggatgagtgtggctttcagtgagtaccaaagagcatttcctcaggtaactgtgtgggtttctatataggcagaactgaccataaactgtggctcaggtaactgaaactgagtcattgaattgcttcagggaccacagtaaaggccaaagtctgcaggcctgcctacatggctgtaagtgtgtgccttcctccaggtcagggaatggcaggacctctgccagactgtggctgggaaaagtttgggatggttacagagtaagttctgaattttcagtaggaccaagttggatgaatcttatcctggtctgtagccaagaacaggggtcctgtagtttcgcacctgaatgagggcctgccttctgaataaaactcttctcaatcttaagctttgacagtgtttcacaactccctccctggatctcaaatctctcttagaggcacttattttggagatggcatcttgctacataacccaggctggtctcgaaatcctggcctgaagcagtgacataaccttaatgtaccatgtagctgtcattacatgtgtgagccacaatgcataaaggcatttttgtcaggtatggctgatatatatacatacacatatatatatatatatacatacacatatatatttttattgtaaggggatatgaaaatagggcacttttagtcttttcatttttttctttttctttttttttttttgatgtggagttttgctctttttgcccagactgtagtgcaatggcacgatcttggctcactgcaacctccgcctcccaggttcaagcaattctcctgcctcagcctcccaagtagctaggattacaggtacctgccaccatgcctgactaattttttgttatttttagtggagatggggtttcaccatgttggccaggatggtctcaatctcttgacctcatgatccgcacgccttggccttccaaagtgctgggattacaggcatgagccactgcacccagctagtctttttatcttactgatgtcactctccttatacatttttactttctattttctacttcaagtttgtctgtaattttagattcagatatttaaaacaatttgttaaaatttgcatattatgcctgcagtaaattagataattagtgggcactccatatttactaaaatatttacttataaatttaattttgctgctggcaaaaaggaattacagaattttcctctactttcttcagcctatatctgaataacaacatagtttattttctaattgttttacatatcagagggtctaaccctattctgcaaagtagatatatatattttctatatttaacaatgtaaggctattctttgcttcaaagttggattacagcagtttcattttgtgtaagaatagcatatatttaaaacaaatataactctagtttcttttaaatgctatttattagaagtttctcattagaatcttctatttataattatactccttattctctgaaattttactgccacacagtgcatgccaatgattcaaaatactcacatttgatgagtatacagtaatagttaaatattccagttacctagacaattttttttgtttttgtgagtctgagtcacgctctgtcacccaggctggagtacagtggtgcgggcttggcttactgcaacctccacctcccgggttcaagcaattctcgtgtctcagctttccaaggagctaagattacaggcataagccactgtgcctggcctcagtgtaggtttcttaacatcagttttttgtgtctgttggctttactttcgtattacaattttagacaatttgcaattctgtttgtacagtttaagtcaatttgaggtttaattaagagataaattatgcatgtttatcacaatcagattacatatgtctgtgtgtttatttataaatgtgaccccaattttagttatggcttatcctatattctttcttagccgattttcaatggcagttttatcttgtctaagtgagttgtcatggaggtagtcttatttttaccatgtgtttaatgatgaatacatatttcgttttgtgagagaaacactttagtgatttgaaggtaattttcaaaaagatttataattctgtatttttttcagttttttttttaaagaatttttttttgagacggagtcttgctctgtcgcccaggctggagtacagtggcgtgatcttggctcactgcaagctccacctcccaggttaacgccattctcctgcctcaggctcccgagtagctgggaccacaggcgcccaccaccaagcccagctaattttttgtatttttagtagagacggggtttcaccgtgttagcctggatggtctcgatctcctgacctcgtgatctgcccgcctcggcctcccaaaatgctgggattacaggcgtgagccaccacgcccgaacaaaagaaatattttaaaaacacataaaatgtaccatcttaaatctattgaagtgtatatttcatggccaggcatgtttgtggctctcatctgtaatcccaggattttgggaggccaagacagaaggatccctggagcctgaaagcttgagaccagcctgggcaacatatggagacctttctctattaaaaaaaaattaataattgccaggcatggtggtgtgcacctgtggtcccatctactttggagattgagggggagtcaaaattgtgcctctacattccctcttgggtgacagagtgagatcctgtctcaaaaaaaagctgttcatttcaggaatgttaattatattcgcattgttatgcaaagacttctagaaactttacatcttgtgaaacttaaactcagtacccattaagtaacaactgctaattttactctctctccagccctagactggacaaaccttccactttctctttttatgattttgacttcttaagatacctcatataaatggaatcatacagtatccattattttgttactggattaattcaggtgacataatattctcaaggttcatcttaaaatatgacatgatttttttttaaggtgggataatatttcatcatatgtatatgttacattttttgatatgtttataaatcaagagacatctgggttgcttcagccttttgtcttttgtgaatactggcacaataaacatggattttcaaatatgtcattattattatagcaagtggggtattgaaatagcctagtataattatatttctctctatgtgcttattcagttttgttagtatttgctttatatatttgaaaccctaatttgaaacacagacacacacaaatacacacaaatttgtgataagttcccagtgaatgaatctatgtattgtttaatgcccttctgtgtctttttgaagttttgacttaaagtacattttataaaatatgacagtttttgacttaagatgtagcttttgtaatattattttgacctcttctgctctcatttcattaatatttacatgaaatttctacttccatctcaccacttacagtctttgtcattagatctgaggtgactcttgtagaaaggcaagttggatcttgattttcaaattttttttttttgagatggagtctcactctgtcacccaggctggagtgcacgtggtgcgacctgggcttactgcaacctccgccttctgggttcaagtgattctcctgcctcagcctcctgagtagctgggattacaggcaggcaccaccatagttgactaacttttgtattttttgtagagacagggttttgccatgttggtcaggctggtaaaattttttaaaaaggctttttattgaaagtatgtctcttgattggaaagataattatatatatttaaatagttttctgaaagaggaaaacttaataatttgtgtgtgtgtgtgtgtgtgtgtgtgtgacagagtctcactctttcatccatgttagagtgcaatggtgcaatctcagatcactgcaacctctgcctcctaggtccaagggattctcctgtctcagccacctgagtagctgggatcacaggcacctgccaccatgcctggctaatttttggtatttttagtacagatggatttatgccatgttggccaggctgggcttgaattcctgaccttaagtgatccaacttccttggcttcctaaagtgctgggactacaggcataagccgccgcacctgaccaatgttactttattaattgttttatttgattcttgtatctttgtctctcattttttctgcctttgtgtgtgtgtttttttttaaatttttgtattgatatgctttcaattttcttcttattttcttttgtgtatctatacagatattttcttagtagtgtcttggggattacacaaaacctctaaaagatccaacaatatgtttaaatgaggtaaaaaattaacttcagttgaatgcaaaaattcttcatgattacatctgccttcaactttgttattgattttgctaattatattatttatttatttatttatttattttttgagacggagtctcgctctttctcccaggcaatactgcagtggcactatctcggctcactgcaagctccgcctcacgggttcacgccattctcctgcctcagcctcccgagtagctgggactacaggctcctgccaccgcgcccaacctccgcctcccaggttccagtgattctagtgcctcagcctcctgagtagctgagattacaggtgtgcaccaccacacttagctaatttttgtatttttagtaaaggcaggctttcaccatgttgaccaggctaccttttatttgtttgtatatttctttcttcctttccttctttatttctagaagcatgttcgttttaaaatataaattatgaatattaaaaatcttcttttctctgtctttgattactattatggctgatttaaaaataagttttggaagaagagaaaacggcagggcggcagcggctgtaggttgtgcggcggcagcggctcttccctgggtggacgatggacagccagagcaggaaggtggtggtgtgcgacaatgacactgggtttgtgaagtgtggatatgcaggctccaactttccagaacacatcttcccagctttggttggaagatctattatcatgtaatgcccaaccttgttttttcctttatttacctagccttgtttctcccttagctaagagaaccagacaaactccatcttggctctttcactggcagccccttcctcaaggacttaacttgtgcaaggtgactcccagcacatccaagaatgcaattaactgataagatactgtggcaagctgtatccgcactccccaagaattcatctgattgataacgcccaaagccccgcgtttatcaccttgtaatagtcttaaagcccctgcacctggaactgtttactttcctgtaaccatttaccttttaactttttgactacttaacttctgtaaaattgttctaactagacacccctccccttcctaaaccaaggtataaaagttaatcaagccccttcctctgggccgagagaactttgcacgttagccgtctctcggtcgccggctaataaaggactcttaattcatctcaaagtgtggcgttttcctaactcgctagggtacaacaatcagatcaaccaccaaagtgggaaacattgaaatcaaggatcttatggttggtgatgaggcaagtgaattacgatcaatgttagaagttaactaccctatggaaaatggcatagtacgaaattgggatgacacgaaacacctgtgggactacacatttggaccagagaaacctaatatagataccagaaattgtaaaatattactcacagaacctcttatgaacccaaccaaaaacagagagaagatggtagaggtaatgtttgaaacttaccagttttccggtgtatatgtagccatccaggcagttctgactttgtacgctcgaggtttattgactgctgtagtggtagactctggagatggcgtgactcacatttacccagtattagaaggcttttctctccctcatcttaccaggagactggatattgctgggagggatataactagatatcttatcaagctacttctgttgcaaggatacaccttcaaccactctgctgattttgaaacggttcgcatgattaaagaaaaactgtgttacgtgggatataatattgtgcaagagcagaaactggccttagaaaccacagtattagttgaatcttatacactcccagatggaggaatcatcaaagttgggggagagagatttgaaacaccagaagctttatttcagcctcacttgatcaatgttgaaggagttggtgttgctgaattgctttttaacacaattcaggcggctgacattgataccagatctgaattctacaaacacattgtgctttctggagggtctactatgtatcctggcctgtcatcacggttgaaacgagaacttaaacagctttacttagaaagagttttgaaggatgatgcggaaaaacttcctaaatttaagatctgcattgaagacccatcccgcagaaagcacatggtattcttgggtggtgcagttctagcggatatcatgaaagacaaagacaatttttggatgacccgacaggagtaccaagaaaagggtgtccttgtgctagagaaacttggtgtgactgttcgataaactccaaagcttgttcccatcacacccgtaatgctttcttttttcttttattgccaatctttgaactcattcaactccaggatatggaagaagcctttctctaccctttgactggaaaggtcaagttttattctggtgtcttgggggagctttgttaaatttttgttaatgtgggtaaatctgaatttaattcaactgcttccctacatagactagagggctaaggattctgtctgctgctttgtttcttctaagtaggcatttagatattcctgtaggcttcctattttcactttacctctctaatgctgctagtcactaggtggtacgcatttattagcataagaaaaaaactttaacaggagcttttacatattactgggattgggggtggtttgggatgggtgggcagctgctgaaccctttagagcatttcctctgtaatgtggtgctttcaactgtactgctgcagctttaagtaccttaaagcttctcctgtgaacatcttagtgaaatgttaggttcagaactaaagtgttttgggtagattttgttgctggggagggtaacagtgggtggtctgatttttatttttgaggtttttcacactggagtacatagaggaactttatttacagtattttgatttggcaggttttcttctacttgtgctctgcctggagctgtttccatatgataaaaaaagcaagtgtagtattccattactatgtggcttagggatttatttgttttttaaaatcaaccacgttagctgggactagactccctacaatccttcaatggaaaagtaacatttaaaaatccttggccgggcgcggtggctcacgcctgtaatcccagcaccttgggaggccgaggcgggtggatcatgaggtcaggagatcgagaccatcctggctaacaaggtgaaaccccgtctctactaaaaatacaaaaaattagccgggcgcggtggcgggcgcctgtagtcccagctactcgggaggctgaggcaggagaatggcgtgaacccgggaagcggagcttgcagtgagccgagattgcgccactgcagtccgcagtccggcctgggcgacagagcgagactccgtctcaaaaaaaaaaaaaaaaatcctttgggtaattcaaattacagatttgaaagtgcttaagatctggtgttttgttaatgcttctgtttattccggaagcattaaggtaacccattgccaagtatcattcttgcaaattattctcttatataactgaccagtgtgtaataaaacaagcaggtacttataaataattactggcagtaggttataattggtggtttaaaaataacgttggaatacaggacttgttgccaattgggtaattttcatttttctttctttttttttttttttttgagacagcgtcttgctctgtcgcccaggctggagttcagtggcatgatctcaactcactgcaagctccacctcctgggttcacaccattcttctgcctcagcctccagggtagctgggactacaggtgcccgccaacacgccccgctaattttttgtatatttaatagagacggggtttcactctgttagccaggatggtcttatctcctgaccgattgggtaattttcattagttgttttatttgttttgatttgaaacctaatttgactgtttaaaatgttggccaaaaaaatcaagatttaaattttttatttgtactgaaaaactaatcataacttaattttcagccatctttgaagcttgaaagaagagtctttggtattttgtaaacattagcagactttcctgtcagtgtcagaaaatcctatttatgaatcctgttgatattccttggtatctgaaaaaaatatcaaatagtacccatacatgaattatttctaagtttgaaaaataaaaagaaactacatcacactaattacaaaatacaagtttctctcgcatccgtgtggagaccaacaaacaggctttgtgtgagcaacaaggctgtttatttcacctgggtgcaggtgggctgagtctgaaaagagagtcagccaagggagataagggtggggtcgttttataagatttgggtagataaaggaaaattacagtcaaaggggggttgttctctggagggcaggagtgggggtcacaaggtgctcagtgggggagtttctgagccaggatgagccaggagaaggaatttcacaagataatgtcatcacttaaggcaaggactggccattttcacttcttttgtggtggaatgtcatcagttaaggcaggaaccacccatctggatttgtatgtgcaggtcacaggggatataatggcttagctttggctcagaggcctgagaacaaattctggaaaaaaatatttttcttcattttaaaacttttttttaaactaataatggctttgaaagaagaggcttaatttggggtgactaaattcaaaagaaattattgacttgagggtctctgtttggtaagaatacataattagcttaaataagcagcaaaaggttagttttaattatgtaacttctgttaatattaagtgttttttgtctgttttacctcaatttgaaaagataagtttgcctgcatgctggacatgcctcagaacacatgaatagcccatactagatcttaggaacatggatctttgagtcactttagactaagttcttatataaatatccccagctttttgagaacagagcttgttaaaggatgcacatgtagggccagtacctactggcaattgtgttcagggaaatgggattgacttggccatttgtcctttggtcataattttaaaatgtgggagtaaaaaacaacaaagaattgaatggactcttaaaacaatgaaagagcatttatcatttgtcccttgaatgtagaatttgtttttgatttcataattctgctgggaaacgtgacagttaaaatggtgtattatgtatatatattataatttagaaataccattttataattttactattccaaggtgacataatgcatttaaatttgggatttgggtggagtattatgtttaactggagttgttgtcaagtatgaatccctcaggaaaaaaaaaatctgttttaaaaagcaatctgattcttagctcttgaaactattgttacttaaatttccaataattaaaaattttaaatttttaaattagaattgccaatactttgacctttgagaagggtttcttagaaatacatttagtaatgtccccaagacattagtcttacatttaaacttttttctttaaaacatggtattggtggttaacttttacacagttctgagttctgctaatatctggaaagtatcttgagatatcagtggaaagctaaacagtctaaatttaacatgaaatacttctttttgattcagaaaataaaatcagatttttttaatgtcaaaagcattaaaaaattaaaaaaacaaaaataagtttttttgaaattatctgcataaaggtttttgcttcattattgacataacttgagacaatacagaaatgaaaatgaacatttgttagtaaaacagcaattatctagctcctggtagtgatttaatctctcacctagtctttagaacttccatcaagacaagaactctttttttccaagagtgtgtgatgtaaaatcacactcttgtttttttgtctttgtggcagaatttgggtatttatggtaatgaaaaagaattctaggtctcttttcagaagaaagatggtgatgatggaagcaaatataatggtacttggtacttagccacatttcaaagcatgccagtacaaagctaaatgaagaaagtcaaataggaaatgagaaaaaaatagctcctagaaacacataaaatgataacaatataattaacaaacaatttttttttttttttttttggttttagacagagtttccctcttgttgcccatgctggagtgcaatggcacaatcttggctcactgcaacctctgcctccgcggttcaagtaattcttttgtctcagctttcccagtagcttggactacaggcacatgccaccacgcatggctaacttttgcatttttagtagagagagggtttcatcatattgatcaggctgatctcaaactcctgacctcagatgatccacctacctcagtttcccaatgtgctgggattacaggcatgagccacagcgcctggataacaactttatttctttaagcaattattttaaatataagttaattaaactacttaataaaataaaatgaaatgtaattttaggactttggaaggccaaggtaggctgatcacttgatcccaggagttcaagacaggcctaggcaacatggcaaaactctgtctctataaaaaatacaaaaaagctagcctggtgtgacggcacatacttgtaatccaggtatttgagagactgaaatgagataatcagcagactttgagagattcaagcagcagtgaaatatgcaaatcagcctggttggcacagtgagttccattctgaaaaataaatgaggctgggcatggtggctcatgcctataatcccagccttttgggagactgaggcaggcagatcacttgatgtcaggacttaaagaccagtctggtcatcatggtgaaaccccgtctctctaaaaatacaaaaaattagcagggtgtggtggcagacacctgtaatcccagctactcaggaggctaagccaggagaattgcttgaacccaggaggtggagtttgcagtgagcagagattgcaccattgcactccagcctgggcaacaagagcaaaactccgtcgcaaaataaataaatacatatataggctgggtacagtggctctcgcctgtaatcccagcactttgggaggctgaggtgggaggatcatgaggtcaggagttcaagaccagcctggccaatatggtgaaaccccatctctactaaaaatacaaaagatagttgggtatggtggcacgcatctgtagtcccagatattcaggaggctgaggcaggagaatcacttgaacctgggaaatggaggtggcagtgagccaagattgtgccactgcacaccagcctgggcaacagagcaagactccatctctcaaaaaaataaaaaaataaataaaaataaataaataataaaaaaaaggaaatagaatgcttgtgcggttttttaaaaagcatacgctatgctgcctacaagagattcatttaagcattgagtcaaataggctgaaagtaacagaatgaaaaaaatgtacattccatgaaaatagtaaccacgattgagtgcagtggtcataattatattagacataatatgctttaagtcaggtagtaccatgagacaaagattgacgttatattatgttaaagtgagttgatttaccaggaatctataactataatatttacttatctatatatatatgtgtatataacatcagggctccaaaatatataaagcaactattgacaaaagtgaagcaagacatacatagcaacataattgtaaacatcaaaaccccatttgcaataataaatagaaagtttagataaaaaataagaaacagaaaacctagacaccattatagactatattaattattttgcatatagatgaatatttgagagtgcataatttataaagaaaaaaggtttagatggctcacagtttggcaaactgtataagtgtgtgccagcatctgcttctggtgaggatttcaggaagcttaaaatcatggtggaaggtaaagagtaactggatatattatatggtaagagacagagcaagtgtgaggtgaagaagccaggttcttttaatgaaccagctctcatttgaattaatagagtgtaaactttttggttaccaagaggatgtaccaagccattcatgaaaaatttgcccctatgacccaaatgtgtcccaccaggtcccacattcaacattgaggatttatattgcagcatgaggtttggaaaacatggacatccaaaccatattatagaccaactagcgttcgcagacacacacaaaactccccagtcaaaaccaagataatgcacaatattcttattttcatctggtgtattttgttagggcacatagcaggttttattaaattttaaaatactgactgggtacagtggctcttgcctataatcttaacactttaggagaccaaggtaagaggatccaccaggaattatgaatatttttcagatggaaaagacatgttgagttagaagacacctctcaaatttttttttttttttttttttttggagacggagtctcgctctgttgcccaggctggagtgcagtgctgtgatctcggctcactgcaagctccacctcccgggttcaggccattctcctgcctcagcctcccaagtagctgggactataggcgtctgacacctcacccggctaattttttgtacttttagtagagaacagggtttcaccatgttagccaggatggtctcgatctcctgacctcatgatcctcccacctcggcctcccaaagtgctgggattacaggcggagccaccgcacctggccaccttttttttttttttttgagatggagtttcgctctcgttgcccaggctggagtgcagtggcacgatcttggctcaccgcaacctcggcctcacaggttcaagcaattcttctgcctcagcctcccaagtagctgggattacaggcatgcaccaccacaccaggctaattttgtatttttagtagagatggggtttctccatgttgaggctgatctcaaactcctgacctcaggtgatctgcctgcctcggcctctgaaagtactgggattacaggcatgagccaccacgcccggccatacactgtgtattttctaacaaaaactgaattaaactaggaattaaaagcaaaagtcaaactggaaagttcaaaaatatgtatatataaaacacttcaatatatttttgctcaggggtcaaaaaattttatttttcaaaaatgtcaatacaacctaccattaaaagataatacaaagttgtttgtcagaaatgtttatttatttacagaaatagcattgattattgattagatatatatcgttatggtttagggtatgggatatagtgtccaatgtggcattattagtttaatttatagctacttgtggcaatagtgaacagtttcaagacatgaatacatagttcaaagaggggagaaataactgcacttttattttcatctctctgaatttgataaccaaaaggacttgcattttttagataaaagttttttatttcccaaatctcaagatctaaattcaaaatttggagctgcacatttagggcctgaatggctggagtagcagcaggtgttacctgtacatttgtgagcactttggcaagaggaggaaggggaaagtggagattctcatgtctatatgtctactcaatgcacacacgttactctgattgggtttctgggccaaatagtttctgtatcagttccagtctgaagatacaagagtcagtgaaagaggtaaaatgattgattgctgccctgtgaagtttgtagaaatgtgatctagcctctctagaagtgactgcagaggactatgaatgccaactaggcagagacacaattctgcctgcatatttaggggacagcatgcactttgctgcacaactctgagctgactggaagcctgagagggaaagtctcctctagagtaaattctggatgtcaccttatgtgtttatatcatgtctggtaattctagacagtgtttggaaacaataattaaatgaaaatttttctccaccccagagaaactccacaataatagaatagaaagaaactgttttattacacaattgaacttgaatgtgacacggatcttcatcaatctgcttaagagacggaaagatggtcactataattaggccacaagtagaagaatttccagcaccatgtcatacatagttcatcctaaattcacctggatactgaagaggccatctgtgtatgctaattacttatattcaatgacaaaaacttttcacatcttcataataggatgtagtttagcagcttgaagccaggtgcctgctgaaggtaggctttcactctgctacaaaaatggttgaatagtgttctatctttttggctacttacattttagagcagtggctctgtactccctggcactgggctacagcactcctgcttgctttctcctggttgctagtgtcctctcttggcctctaccatctgccactgaggcacaaaccacagctcacattttatgtgaatcctatttgccacagcagcactctagtgtcacatcagagagtgaggcctgagctgcaggaggagagcctgcaggcctcctgggtagaattacaccttcacaatcatgagaatgtgagcagtgtttcagcgtcaatttctacgtatagagatgacaaggaaaagataaagctgaattttcagcatgagtccagatagtgatagctgcaaaaattctcattgtgacagcccaccttaatctgacaccatgggacactaatagggcttctgaaacacacacccaaagcattggagagaaaaatgagatcttgatctgagcaagattattttcatagaaaaatattataaagatcttaagaaaaagctcagattagatatgattgatcaagtcagtcaaaaaatattcccctaaaagcaatttctctctaaacacccaaagtgcacagctactctcagcatgagaaacatgagcttcaggaagaaagaaggcagattttcagaagaattttataaagttttttttccatctttggtgctctctcatctcctagccagtgaatggagttctatattgaaatacatctgacaacttccaacaacactttttgatgaagaaatagaatctgactgttttcatagagtggaatatattagaacttgtaggctgggcgtggtggctcacgcctgtaatcccagcactttgggaggcagaggtgggtggatcacgaggtcaggagttcaagaccagcctggccaagatggtgaaaccccatctctactaaaaatacaaaaaagtagccaggcacggtggcaggcgcctgtagtcccagctactcaggaggctgaggaaggagaatcatttgaacctggagggtggaggttgcagtgagccgagatcatgccactgcactccagcctgggtgacagagtgaaactccatctcaaaaaaaaaaataaaaataaaagaacttgtaacatagttaactgaatagctattattggttttgggtggccacatcacctgtctttatttttcctgtaatagcagcattccaatttagtgcaataaaagatactaaagttgtgttaattcataattatccctattgaataaagtaataaacatgtcacactaatatctactgtaacaatttggtagtaaattttctttggatattaggtataagtatctaagtatgaataattttaatgaactagtcataatgtatgtagcattttaaaaaattgcaactatagccaggcacggtgtctcacatctataatcccagcactttgggaggcctaagcgtgcagatcatgaggtcaggagtttgagaccagcttggcctatatggtgaaaccctgtctctactaaaaatacaaaaattttagccaggcatggtggagcctgcctgtggtcccagctacccgggaggctaaggcagaagaatcgcttgaacccaggaggcagaggttgcagtgagatgagattgcagcactgtggtctagccaggacaaaaaagtgagactccgtctaaaaaaaaaaaaaaaaaaaaaattcaactatacttcagttaaaacactatatttcaaaagtataaataacaatattaaaataacaacttaagtgattcattcaaagtaagtattgtggctttatattcatattatgtagaaaatactgtttacaggtcacgcctgtaatcccagcactttggaggagtgaggcggttggaccacctgaggtcgggagttcaagatcaagctggccaacatgagaccctcatctatactaaaaatacaaaaacttagccaggcatggtggcacatgcctgtaatgccaggtacttgagaggctaaggcaggagagtcgcttgaacctgagaggcggtggtttcagtgatccaagatcatgccactgcactccaacctggacgacatggtgagactctgtctcaaaaaaaataaaatactgtttaatgtatatgaatgcaatttgtttacaaaccctacacataactatgctaatcgttctgaagtaataaatagaaagcaagatacaactacagactctactgttcagtttatgcactgaactgtttttgctttcaccgtataagtccttcagcctgcaaatattgggtaattaccttggataatcagatttctttcaaagaaacttagtatctttcagtctttatcattctgtattgcaaaatttaatcctatctttgtgctaagcatctgtgtgctcttaaaatgagcatttatctaaaccatctgtgtctactttaaaggactaaaaatgaaaaagataaacttttcagaagcaaaaagaaagcaaaaaacctgaagtactagataaagataatctggagtctgaaaaaatgactaaaggtttatttaactgttaatataatttacatatatttcaaaaaagcagagaaaaatatctacatataatcaaaatgccttaagaaaagagagaatagtaaaatagctttttgatactttttaaagagtttttgaactcttggacacctgaattttgcacactatatgcacttaaggtgatgcttatgggagaaaaacacaagagagaatgatgttataaaaaaatccatgcatgcaaaagacctttgcaacagaatagagagaccagaaataatgccaccctcctacaaccatcagatttttgtcaaacctgacaagagaaaagtgggaagaattctctctttaataaatgatgctggaataactacctagcactatgtagaagacagaaactggaccccttcattacaccatatacaaaaatcagctcaagataaattaaagacttaaatgtaaaacttaaaattataagaaaccctgcaatataacctaaaaaatactgttctagacatagaaactggcaaagacttcatgatgaagcttccaaaagctattgccacaaaagcaaaaattgacaaatgggacctatttaaactaaagagcttcttcacagcaaaggaaactatcaacagagtaaagagacaacctacagaataaaagaaaatatttgcaaactttgcctctgacaaaggattaatatccagaatttattaagagctcaaacaagtttacaagaaaaaaaacaaacaacctcattaaaaagtagaaaaaaaatgaacatattcttttcaaaagaagacaaatgtgcagttaacaagcatgtgaaaaaaatgctcattgctaattattagagaaattaaaagaaaaaccacaatgagatactgcatcatacccatcagaatggctattttttaaatgtcaaaaaataacagatgctggcaaggttgcagagaaaagggaatgcttatactctgctggtgggagtgtaaattagttcaacagctgtaaaaagcagtgtggtgattcctcacagaattaaaaacagaattatcatttgactcaggaacctcataattgggtatatacccaaagaaatataaattattataaagacatatccacatgcatgtttattgcagcactattcacaatagcaaaggcatggacgggtcctgaatggctatctatgatagactggataaggaaaatgtggtatggtcagatgcggtggctcacgcctgtaattgcagcactttgggaggctgaggcaggtggatcacacggtcaggcgtttgagagcagcctggccaacataatgaaaccctgtatctactaaaaatacaaaaaattagccaggtgtcgtggcaggcacctgtaatcccagctactcacgaggctgaggcaagagagtcacttgaacccaggaggcagaggttgcagtgagccgagatcacgccagtgtactccaaccgaggtgacagtgtgagactttgtcaaaaaaaaaaaaacaaagaagaagaaattaaaaaaaaagaaaaacgaactggacctttaataacttcctctttctggcttaatattagccttagcttggagtctcttggttaaaactttaatttccatgtcagaggtattcacttggtgttgaaactaactgaaaaatccggtgaaactactcaaagtgtttacataagggaaggaaatttaaagtgctcacttttttttaatggtttttttttttgagatggagtctctctctgtcacccaggctggagtgcaatggcacaatctcagctcactgcagcctccacctcccgtgttcaagccattctcctgcctcagtcttccaagtagctgggactacagtcatgcgccaccacactcggctaatttttgtaattttagtagagacggggtttcgccatgttgggcaggctggtctcaaactcctgaccttaagtgatcaaaccgcctaggcttcccaaagtgttgggattacagttatgagccagtgtacctggctaagatgcttacattttattcctccataagaaaagcaaatatatctacttctttcagacaatatatgtattattttattatttctattaaaaataatgtagtaaaaaattagtcatatgagaaaacttgtagaagataccatgtttcatcacatataatttagcatttaattcagaaatcaagacaacatgatatagaactgagatattcactgtcacaaatttaccctgcaaaaagaggaactgatgttttgacaagtctatgtaactcatcaattatctaccacattttcctgtggaaatatgtttattgtctacagtcaaaacagaagagagattttctttctttcttttttttttttttttatggagtctatctctgttgcccaggctggagtgcagtggtgtgatcttggctcacggcaacctccacctcccaggttcaagcaattctctgcctcagcctcccaagtagctgagattacaggtgcctgccatcgcgcctggataatttttgtatttttagtagagacagggtttcactgtcttggacaggctggtgttgaaatcttgaccttgtgatgcatccgcctcgtcctcccaaagtgctaggattaccggcatgagccactgcgcttggctgatagctagcattcttaaagctaaggcttggaattctgtttgaaatcactcagccatagaaaacacctggccaggcatgggggctcatgcctgtaatctcagcactttgggaggctgaggcaggcagatcacgaggtcaggagttcgagaccagcatgaccaacatggtgaaacctgtctctactaaaaattaaaaaattagccgggcatggtggcatggtacctgtaatttcagctactcaaaaggctgaggcaggagattcccttgaacccgggtggcaaagctgagatcatgccacttgttggggtgatcagacccaataccagaccattgtggctatgaagtccagtggagtcaaaggaatgagaaaagacaggttaagagtacataaggtgggtccagagggccaaagctagtatggaaactgtgagggccccaagctttggaagcccacactatttattggtgatcaaacaaagaagcaggtggtgaggatgtgtggatgtgggggtaaacaggtgaggacataaggacgtgagggtagaaaggtaacagtgcatcaagtgtagctgtgacggtttagcattttctttgacacataaagagtatgctctgctgcttgagataatggagaacatatttatgagcctgggagagcaaccaacaagtctgtgcacattctagaggccacgaggggttttatgccctgagccttggattccatccaagccgtgaggggttttatgccctgggctcagatttgtgttttgtcagggcagccttccaccatttggcacagagtttgatgttccaaaggccatgagggattttagaccctggacccaggacatcttccaagactcttttatattatgacagacaagccagtcctgcctcagctcttctaccaacaccactgcacttcagcctggttgacagagctagactccatctcaaacaaaaacaaacaatcaaacagaaaaacacctgaaaatattcctaaggttactctgggaaagaaaaaggtaaataagaattattaactaatagaatatatgattaaatactaatttttgaaactcatctctattatgtcttttgtaaatattttcttatttttcagcccctactaataaaatgcaaatcacagtaaaaaatactgatacagctcagtgcagtggctcatgcctgtaatcacaacactttgggggccaaggcagggagatcacttcacaccagaagttttggagcagcctggtccctctctactaaaaacacaaaaactagccaggcaaagtgttgtgcacctagctacttgggaggccaaggaatgagaatcacttgaacccaggagggggaggttgcagtgagccgagatcaagccactgcattgcagcctgtgtaacagagtgaaaccgtcaaaaaaaaaaaaaaaaaaaaaaaaaacccgaaaaaacgaaaaaacctgaggtcaaaataagtaaagaaatcttttcaatgtacagacccaatcatccaacccatcctgttcacttacatgctcaataaccaccctcccaggagacactgctctatgccccagtgagtgccccaggtgcattttactttgtttttatgccatctcactggggtcagtttttttgtcttttggaattttttatttttattacaaaattttcactgtttttatttcactgtttttctgcccccactcaagaaaatccagggggcagaaattatttgttttgccctcaataccagcatttgattggctgaccagcaatgtgtatccaaaaaatggaagctaggttgggtgaagaaaatcttcatgtctcaaggggttagctttaaaaaaagaaaaagaaaaataaaaacaaacatgcaccaggagatgcctttcacctccaaggctgccacctgctcccttgagaggctacactccatacttcaggtggttctatgggagaaaatgacccaagagacaatagtcactagacacatagccatagccatagtgggtatcttggtttatccccagaaagtactaaaacccaggcccagaaaaaaaaaactgaaggatagctgaggacacatcaccctatgaagtttccaaagggtaatcttaacctaaaaacattctggtaagttctctggaaaaaaaaaagcaaaagagggacagatatttttacaatacagtgtcaggggattattctttgctttcttctcagggaaaatatttacaaacagaaaaaaatctcttcaatactgttatgccatgctttgtataaaatgattaattgaggaacatggggtacacttgaggcgctgcttggggcacatgtgaaaaatgccaggaaaaatcagtcccctgtgggatgtgaaaataattaagtggcaggcaattagactgaggatgctctagtacccagattcctacttctaaaaaaaaaaaaatctaaactcaagtgcattttttggtaaattactacattaggggaacaaaattcaagcttaaacaactataaactaccacttaaactctgattaaataaccagggaatttccaccttgattgtaccaattaagaaactacgtaactgcatctaaccaattattgaatttggttttcttcttcatgcaccttataaatgtcttttcttcaagaccctcccacggagaacaaactacaaactatagctagctggtctacaattcttgaatctctctttttgaggctgggcacggtggctcaagcctgtaatcccagccctttgggaggctgaggcgggcagatcacaaggtcaggagatcgagaccatcctggctaacacggtgaaactgcctctctactaaaaatacaaaaaattagccaggcacggtggcaggagcctgtagtcccagctattcaggaggctgaggcaggagaatggtgtgaacccaggagatggagcttgcagtgagccgagattgcgccactgcactccagcctgggtgacagagcgagactccgtctcaaaaaaaaaaaattatttgatatttttacagtgactcccaaaattttttttttaagacagactcttgctctgtcgcccaggctggagtgcagtggcatgatctcagctgacaacaacctcggcctcccaggttcaagccattctcttttctctgcctcccgagtacctaggactacagacattcgccatcacacccagctaatttttgtatttttaggagagatggggtttccccattttgtccaagctggtcttcaactcctgacctcaagtgatctgcccccctcagcctcccctagtccccacacaatctgggagagatgccacactgcgggtgcagagtcacctggagagggctccaggccagggcacagtcactgagcagggaagagaaaggacggccgggagcccagctgtcagcatagcggccatcttatggctgaagggtactgaggctgagctgggcaaggagaactcggaaagcagattgtggagctgactatggggaggcctgggtcctgccacagccattttcctgccaagggaggctgtgactgagcgggctacccagcctgggaaactgctttttccatggaactgtgcaacccacagttcagaagattccacttgtgaacccttgccactggagcctgagatctgaaccctggaggtgagcaattctcaacagcctctctcctagaatctgcttaagcctgccaagatcccgggggaggggtgtggggaaaagagagatcagactgctactgtgtctatgtagaaagaagtagacatgagactccattttgttctgtactaagagaaattcttctgccttgagatgctgttaatctgtaaccctagccccaaccctatgcttcctgagacatgtgctgtgttgactcaaggtttaatggatttagggctatgcaggatgagctttgttaaaaaagtgcttaaaggcagtatgcttgttaaaagtcatcaccattctctaatctcgagtacccagggacacaatacactatggaagttggcagggatctctgcctaggaaagtcaggtattgtccaaggtttctcctcatataatagcctgagttattgcctcatgggaagggaaagacctgaccatcccccagcctgacccccataaagggtctgtgctgaggaggattagtaaaagaggaaggcctctttgcagttgagacaagaggaaggcatctgtctcctgcttgtccctgggaatggaatgtcttggtgtaaaacctgatcacacattctatttactgagataggagaaaactgccttatggctggaggtgagatgtgctggcggcagtactgctccttaatgcactgagatgtttgtgtaaagtcaaacataaatctggcctacgtgcacatcaacgcacagtgtctttccttaacttatttatgacacagagatcttttctcacgtgttttcctgctgaccctcttcccaccattaccctatagtcctgccacatccccctctctgagatggtagagatagtgatcaataaatactgagggaactcagagaccagtgccagcgcgggtcctctgtatgttgagtgccggtcccctgggcccactgttctttctctatactttgtctctgtgtcttatttcttttctcagtctctcatcccacttgatgagaaacacccacaggtttggaggggcaggacaccccttcatctggtgcccaatgtgggtgcttttctttaggttgaaggtatgccagagcgtggtcattgaggacaagttgatgagagattcccgagtacatctatggtcagccttgcggtaagcttgtgcgctcagaagaacctagggtaacaatgggataaactgaaagtaaatatgcctcttagctttattaaaattcttttaagaagagggggagttagagtctctacagaaaatctaatcacgctacttcaaacaatagaacaattctgcccatggtttccagaacagggaactttagatctaaaagattgggaaaaaattggcaaagaattaaacaagcaagtagggagggtaaaatcatcccacttacagtatggaatgattgggcccttattaaagcagctttagaactgtttcaaacaggagaagatagtttcagtttctgatgcccctgaaagctgtgtaatagattgtgaagaagaggcagggatagaatcctagaaaggaacggaaagttcacattgtaaatatgtagcagagtctgtaatgactcagtcaatgcaaaatgttgactacagtcaattacaggaggtaatatatcctgaaacattagaattagaagaaaaaggtccagaattagtggggccatcagagtctaaaccatgatggccaactcctcttccagcagttcagatgcctgtaacattacaacctcaaatgcaggttagacaagtacaaacctgaagagaataacaaatagagaaagatagagtatctgtcacagcaatgccaatccaaatacagtatccacaatatcagctggtagaaaataagacccaactgccagtagcctatcaatactggccgccagccgaacttcagtattggccgcccctagaaaatcagcatggacagccaggaatgtttccagcaccacagggcagggcactatatccgcagcctcccactatgagacttaatcctacatcaccacctagtagacagggtggtgcattacataaaattattaaagcaagaaaacaaggagatatcgaggcgtggcagttcccagtaatattagagccgataccacctgaagaaggggcccaagagggagagcctcccctagctgaggccagatatgagtccttttctataaaaatgctaaaagatgtgaaagagggagtaaaaagtatggactcaactccccttatttgaggacattattaaattccattgctcatggacatagactcattccttttgattgggagattttggccaaatcatcactctcaccctctatcttttacaatttaagactttgtggattgatggggtacaagaacaggtccaaaaaaatagggctgccaatcctccagttaacataaatgcagatcaactattaggaacaggtcaaaattggagcactactaatcaacaagcaataatgcaaaatgaggccattgagcaagttagagctatctgccttagggcctgggaaaaaaatccaagacccaggaaccacttgcccctcattcagtactataagacaaggctctaaagagccctaccctgattttgtggcaaggctccaagatgctgctcaaaagtcaattaccggtgaaaatgcccataaggtcatagtggagttgatggcatatgaaaacaccaatcctgagtgtcaatcagccattaagccattaaaaggaaaagtcccagcaggatcagatgtaatctcagagtatgtaaaatcctgtgatggaattggaggagctatgcataaagctatgcttatggctcaagcagtaatgggagttgctttaggaggacaatatttgggggaaatattataattgtggtcaaattggtcatgtaagaaagaattgcccagtctcaaataaacaaaatataacaactcaagctactacaacaacagataaagagccacctggcctatgtccaagatgtaaaaaaggaaaacattgggctaatcaatgtcattctaaagttgataaaaatgggcaaccattgtcgggaaatgagaagaggggccagcctcaggccccgcaaaaaacggggcgttcccagttcagccctttgttcctcagggttttcagggtcaacaatgcccactgtcacaagtgcctcagggaatgagccagttaccacaatacaacaattgttccccaccacaagtggcagtgcagcagtagatttatgtaccatacaagcagtctctctgcttccaggggagcccccacaaaaaaatccccacaggggtatatggcccactgcctgaggggactgtaggactaatcttaggaagatcaagtctaaatctaaagggagttcaaattcatactggtgtggttgattcagactaccaaggcgaaattcaattggttattagcccttcaattccttggagtgccagtccaggagacagaattgctcaattattactcctgccttatattaaggttggaaatagtgagataaaaagaacaagagggttgggaagcactgatccaacaggaaaggctgcatattgggcaagtcaggtctcagagagcggaccggtgtgtaaggccattattcaaagaaaatagtttgaagggttagtagacactggagcagatgtctctatcattgctttaaatcagtggccaaaaaattggcctaaacaaaagactgttacaggactcatcggcgtaggcacagcctcagaagtgtatcaaagtactatgattttacattgtttagggtcagataatcaagaacgtactgttcagccaatgattacttcggttcctgttaatctgtggggttgagatttattacaacactgggatgcagaaatcactatgcccactccattatacagccccatgaatcaaaaaatcatgactaagatgggatatgtaccaggagagggactaggaaaaaatgaaaatggcatgaaagtcccaattgagactgagagaaatcaagaaagaaaaggaatagggtatccttcttaggggtggccactgtagaacctcctaaacccattccattaacttggaaaacagaaaaactggtatgagtaaatcagtggccactaccaaaacaaaaactggaggctttgcatttattagcaaaggaacaattagaaaagggacatactgagccttcattctctccttggaattctcctgtgtttgtaattcagaaaaaatctggcagatggcatatgttaactgacttaagagccataaatgccataattcaacccatggggcctctccaacctgcattgccctctccggccatgatcccaaaagactggcctttaattataattgatctgaaagatcgcttttttaccattcctctggcagagcaggattgtgaaaaatttgcctttactataccagccataaatagtaaagaactagccaccaggttgcagtggaaagtgttacctcagggaatgcttaatagtccaactatttgtcagaatttcataggtcaaactcttcaaccagttagagacaagttttcagactgttatatcattcattatgttgatgatattttatgtgctgtagaaacgagagacagattaatttattgttatacatttctgcaagcagaggttgccaacacaggactgacaataacatctgataagattcaaacctctactccttttcattatttagggatgcagatagaaaatagaaaaattaagccacaagaaatagaaataagaaaagacacattaaaaacattaaatgactttcaaaaattgctaggagatattaattggatttggccaactctaggcattcctacttatggcatgtcaaatttgttttctatcttaagaggagacccagacttaaacagtaaaagaatattaaccccagaggcaacaaaagaaattaaattagtgaaagaaaaagttcagttgcacaaataaatagaatagatcccttagccccactccagcttttgatttttgctactgcacattctccaacaggcatcattgttcaaaatactgatcttgtggaggggtcattccttccccacagtacaattaagacttttacattgtacttggatcaaatagctacattaattggtcaggcaagattacaaataataaaattgtgtggaaatacccagacaaaatggttgtccctttaaacaaggaacaagttagacaagcctttatcaattctggtgcatggcagattggtcttgctgattttgttggaattattgatcatcattacacaaaaacaaaaatcttccagtttttaaaactgactacttggattttacctaaaattaccagacataaacctttagaaaatgctctgacagtgtttgctgatggttccagcaatggaaaggcagcttacacagggccaaaagagtgagtaatcaaaactcagtatcaatcggctcaaagagctgagttggttgtagtcattatagtgttacaagattttaatcaacctattaatattgtatcagattctgcatatgtagtacaggctacaaggggtgttgagatagctctaattaaatatagcctggatgatcagttaaaccagctgttcaatttattacaacaaactgtaagaaaaagaaatttcccatttatattactcatatttgagcacacactaatttaccagggcctttaactaaagcaaatgaacaagctgacttcctagtatcatctgcattcataaaagcacaagcactttgtgctttgactcatgtaaatacagcaggattaaaaaacaaatttgatgtcacatggaaacaggcaaaaaatactgtatgacattgcacccagtgtcaagtcctacacctgcccactcaagaggcaggagttaatcccagaggtctctgtcctaatgcgttatggcaaatggatgtcacacatgtaccttcatttggaagattatcatgtgttcatgtaacggttgatacttattcacatttcataagggcaacctgccagacaggaaacagtacttcccatgttaaaaaacatttattgccaggcgcggtggctcatgcctgtaatcccagtactttcgaaggccaaggcgggtgaatcacctgaggtcaggagttcgagaccagcctcaacatggagaaactctgtctgtactaaaaatacaaaattagccaggtgtggtggtacatgcctgtaatcccagctacttgggaggctgaggcaggagaattgcttgaacctgggaggcagaggttgcggtgagccgagatcgtgccattgcactccagcctgggcaacaagagtgaaactccgtctcaaaaaaaaaaaaaaaaaaattattatcttgttttgctgtaatgggaattccaaaaaaaaaaaaaaaaaaaaaaattaaaactgacagtgggccagaatactgtttttaagctttccaaaaattcttaaatcagtggaaaattatacatacaacaggaattccctataattcccaaggataggccatagttgaaagaagaaatagaacactcaaaactcaattggttaaacaaaaagaagggggagacagtaaggagtgtaccactcctcagatgcaacttaatctagcattctatacttcaaattttttaaacatttatagaaatcagactactacttctgcagaacaacatcttactggtaaaaagaatagcccacatgaaggaaaactgatttgatggaaagacaacaaaaataagacatgggaaatagggaaggtggtaacgtgggggagaggttttgcttgtgtttcaccaggagaaaatcagcttcctgtttggatacccactagacatttgattctacaatgaacccatcggagatgcaaaggaaagcacctccacggagacggaaacaccgcaattgaacaccattgactcataagatgaagaaaaaggtcatgtcagaagaacagatgaagttgccatccaccaagaagacagagccgccgacttgggcacaattaaagaaggtgacaccgttagctaaaaaaaagcctggagaacacaaaggtgacacaaactccaaagggtatgctgcttgcagctttgatgattgtatcaatggtggtaagtctccccattcctgcaggagcagctgtggctaattatacctactgggcctgtgtgcttttcccgcccttaattcaggcagtcacctggatggataatcctattgaagtatatgttaataatggtgtatgggtacatggccctacagatgatcgttgccctgccaaacccaaggaagaaggaatgatgataaatatctccactggatatcgttatcctcctatttgcctagggagagcactaggatgtttaatgcctgcaatccaaaattggttggtacaagtacctactgtcagtaccatcagtagattcacttatcacatggtaaggggaatgtcactcaggccatgggtaaattatttacaggacttttcttatcaaaggtcattaaaatttaggcctaaagggaaacattgccccaaggaaattcccaaaggatcaaaagacatagaagttttagtttgggaagaatgtgtggccaagagtgcagtgatattacaaaatgatgaattcagaactattatagattgggcaactcaaggtcaattctaacacaattgcacaggacaaactcaatcatgtcccagtgcacaagtgagtccagctgttgatagtgacttaacaggaagtttagacgaacataagcataaaaaattacagtctttctacacttgggaatggggagaaaaaggaatctctactttgattggacttcagcgaagactccaagatggcaatcgccacctcggataccctaactcagcatttccgggttcacctttcctgttcccaccaccccgactaacgcacatgcccactagggcgtgtcacactcagaagtgtgaaactcaaccgatcccgcccctaccccgaccactcctcacccagcatccataaaagcgcgctgcacctttcgcacagcgtgacttcccctggcggaccagtgaacctcaccggagagctcaataaagaagatttttgccctctttgtcttgcctcttggccttattgatccacggtgcctttccattgcctttcatactccaagaccaaaaataataagtcctgtttctggtcctgaacatccagaattacagaggcttactgtagcctcataccacattagaatttggtctggaaatcaaactgtagaaacaagagatcgtaagccattttatactatcgacctaaattccagtctaacagctcctttacaaagttgtgtaaagcccccttatatgctagttgtaggaaatatagttattaaaccagacccccaaactataacctgtgaaaattgcagattgtttactagcattgattcaacttttaattggcagcaccgtattctgctagtgagagcaagagaaggtgtgtggatccctgtgtccatggaccgactgcgggtggcctcgccatccgtctgtattttgactgaggtattaaaagacattttaaatagatccaaaagattcatttttactttaattgcagtgattatggggtggcaaaagaattctacaagattgtggaattcacaatctggtattgatcaaaaattagcaaatcaaattaatgattttagacaaactgtcatttggatgggagataggcttatgagcttagaacatcatttccagttacagtgtgaatggaatacttcagatttttgtattacaccccgagtttataatgagtctgagcatcactgggacatggttagacgccatctacaaggaaaagaagataatctcactttagacatttccaaattaaaagaacaaatttttgaagcatcaaaagcccatttaaatttggtaccgggaactgaggcaatcatgggagttgctgactgcctctcaaatcttaaccctgtcacttgggttaagaccatcagaagtactactattataaatttcatattaatccttgtgtgcctgttctgtctgttgttagtctgcaggtgtacccagcagctccaaagagacagggaccatcaagaacgggccatgataacgatggtggttttgtcaaaaataaaagggggaagtgtggggaaaagaaagagagatgagactgttactatgtctatgtagaaagaagtagacataagagactccattttgttctgtactaagagaaattcttctgccttgagatgctgttaatctgtaaccctagcctcaaccctgtccttgcagagacaagtgctgtgttgattcaaggtttaatggatttagggctgtgcaggattactttgttaaacaagtgcttgaaggcagcatgcttgttgaaagtcatcaccattctctaatctgaagtacccagggacacaatacactgcggaagcccgcagggatccctgcctaggaaagccaggtattgtccaagggttctccccatgtgatagtctgaaatatggccttgtgggaagggaaagacttgaccatcccccagcccgacacccataaagggtctgtgccgaggaggattagtaaaagaggaaggcctctttgcagttgagataagaggaaggcatctgtccctgggcaatggaatgtcttggtgtaaaacccaatggtatattgtatttactgagataggagaaaaccgccttagggctggaggtgagacgtgctagcggcaatactcctcttcaatgcaccaagatgtttatatacgtgcacatcaaggcacagcatctttccttaaaattatttatgacacagagacctttgttcacatgttttcctgctgaccctctccccaccattaccctattgtcctgccacatcccctctccaagatgatagagataatgatcaataaatactgagggaagtcagagaccagtgctggcgcaggtcctccatatgttgagtgccagtcccctgggcccacttttctttctctatactttgtctctgtgtctctttcttttctcagtctcttgtcccacctaacgagaaacacccacaggtgtggaggggctggccacccctttagctgtgtgatagataagtaaaaacagcaccatctaattcataatgggaagggtgtttctttccataagctgttcctagagtacacaaaggatggagaattttaccaatcacaaatattttcctggattatctatccattttatatttccccatgtattttctttgttctatgcatttcttccatttggcttttcctggggtgcatcctatatattaaaccagtaaacataactacagtgtttttctgagttctgtgagtagctctaccaaattactgaacttcagggaggttttgggagtctccagttttcaaacagtgtgtcagaagtataaatgggcccatggggtttgtgactggcatctgcagtgaggacaaggttgtgggactgagccctgaatcagggtctgtgctgactctgggtggtgtcagaattcaaatgtaagacaatgagctggtgttgaagaattgtttgatgttcagcaaactacagattttgtgccagaaaaagcatatcatggaggcctggcctggaacaaaactctgagtgtctgggaatgggaggctctgctctcctgcacacaggctgtcacgctgcccgttgtcctgtgattccagctcttctcccagggtgacagaggactgaaacttacaggaaaggagctctgatgacagaccccttttctttcaactgcatccacaggattcccactcactcacaaacatacatactagacattgatgtgtccgcactcctcccaggactaggcaccaccctcaggaacttcaccatggcatttttgatccaaatgtttcttgccaagaactcacaagtgtctacaagtctcctgtcatatcctcactcccagacattgagccttgagcagcaacctgttttctccaccaacctaaggttctggacctcctgtttataatctcatctgcctgcattcacacagaaataaatcagagtacagccccacctgggccactagctgcagtgaaaatcagtccattcacctacattgcactctatcccatgcagggattttgtttttttcttttagcttttatttttggttctgtgtacacatgtgggatatacagctaaaattatgtcatgggggtttggtgtgcagattattttgtcactgaggtactacccgtagcaccaaacaggtctgttttctcatcctcttagtcctcccaccgtctaccctcatctaggcctcagtgtctgttgttctcctctttgtgtttttgtgttcttattacttaactcttacttataaataataacatgcatttggttttcactttctgcattagttttcttttatgtttttgttttgttttgatttttgagacagagttttgctcttgttacccgggctagagtgcgatagtgcaatcttgacttactgcaaccttagcctcccaggttcaagcaattctcgtgcctcagcctcttaagttgctgggattacaggtgcatgccactacccctggctaattttgtatttttagtaaagacagggtttttccatgttagtcaggctggtcttaaactcccaacctcaggtgattaccccgcctcggcctcccaaagtgctgggattacaggtgtgagccaccgctcccagcctctgaattagttttctgagaataatggtctctagcttcattgatgttattggaaaggacatgatcgttttgttttttaatagacacagagttttccatgatgtttatgtaccatattttgtttttactaaatcttttattttattttacttttttgaggtagggtctcgcttattgcccaggctacagtgtcatggcatgatattggcttacttcagggtcaagcaattctctcctatctcatcctcacaagtagctgtgagttcacatgtgcgttaccacgtctggccaatttttctttttttttttttgaggtggagtttcactctgttgcactccgttggagtgcagtgatgcgatctcggctcactgcaagccccgcctcccgggttcatgacattctcctgcttcagcctccagagtagctgggactacaggctcccgccaccacgcccagctaattttttgtatttttagtagaaacggggtttcaccgtgttagcgaggatggtcttgatcgcctgacctcgtgatctgcctgccttggcctcccaaagtgctgggatgacaggcatgagccactgcgcctgatcaatttttctttttgtattttccgtggacacaggattttgccatgttgcccaggctggtctcaaacttctaagctctggcaatccacctgccttggcctcccaaagtactgggattacaggcatgagccaccagatctgaccataccatattttctttatccaatctactactcataggcatttagggcctgtccttatctttgctattgtgaatagtgctgcagtgaacatgcatgtggatgtgtctttataatataataatttatatttctttggttatatacccaattataagattcctgggtcaaatgataattctgtttttagttctgtgaggaatcaccacactgctttttacagttgttgaactaatttacactccctccagcagagtataagcattcccttttctctgcaaccttgccagcatctgttatttattgactttttaaaaatagccattctgactggtgtgaggtggtgtctcattgtggtttttttaaaaaaaattttctctaatgattagcaatgagcatttttttccatatgcttgttagccacatatgtatcttcttttgaaaagcatctgttcatgtattttgcctactttttaatgaggttgtttaggtttttcttttaaacttatttaagtttctaataaattctggagattagacctttgtcagaggcaaaacttgcaaatattttcttttattctgtaggttgtctttttcctctgttgatggtttcctttgctgtgaagaagggttttagtttaaataggtcccatttgtcaatttttgcttttgttgcaattgcttttagtagcttcatcatgaagtctttgccggtttctgtgtctagaatagtgtttcttaggttatcatgcagggtttcttataattttaagtttacatttaagtgtttaatttatcttgagttgatttttgtatatggtgtaatgaaggaatctagtttcagtcttctacatagtgctaggtagttattccagcaccatttattaaatagagaattcttgctacattcctcttgtcagctttgtcaaaaatctgatggttgtaggaaggtggcattatttctgtgctctctattctgttgcattggtcttgtgcactcatggatttttttataacatctttgtctcttcttttttttttttttttgagacagagtttcgctctgtcgcttaggcagagtgcagtggcgcgatctcggctcactgcaagctccgcttcccgggttcacgccattctcctgcctcagcctcccgagtagctgggactacaggccacagcgcccggctaattttttgtatttttagtagaggcggggtttcaccgtgtcagccaagatagtctcgatctcctgacctcttgatccacccacctcggcctcccaaagtgctgggattacaggcgtgatccaccgcgcccggcctcttctcctttttctccataaccattctttgaagtgcatacagtgttcaaaattcagatgcccaagagttcaaaaactctttaaaaagtttgaaaacaaattttgctattctctctgcttttaagggattcagattatatgcagatatttttctctgcttttttgaaatatatgcaagcgatattaacagctaaataaatcttttgttattttttatgactccagattttctttttctggtacttcagatttattgctttgttttagcttctgaaaagtttatttttttcatttttagtcctttaaagtagacacagatttgtttagataaaagctaatttaagagcacacagaagcttagcacaaagataaaattaaatttagcaatacagaatgataaacactaaaagatactaaatttttttgacagaaacctgattatccaaggaaattatccaatatttgcagactgaagtacttatactggaaaaacaagaacagttcagtgcataaactgaacagtggagtctgtagttgtaccttgctttcaatttattacttcagaacaattagcatcattatgtgtagtgtttgtagacaacctgcattcatataaataaaacagtattttctttttttcagacagagtctcactctgttgcccaggctggagtgtagtggcataatataaagccctaccatcttggtcaggctggtctcaaactcctgatgtcatgatctaccaacgttattcttccaaagtgctaggattacaagtgtgagccaccacatctggccatataatttctacttcttttactttactaagtgtacatatttattttctaataaaattacctaagaaaggctgggcattgttgctcatgtctgtaatcctcgcactttgtgggactgaggcaggtggatcacaaggtcaagagttcgagaccagcctggccaatatagtgaaatgctgtctctactaataatacaaaaatttgccgtgtgtgttggtgcacacctgtagttccagctacttgggaggctgaggcagaagaatcacttgaaccctggaggcagaggttgtagtgagccgagatggcaccactgcactccagcctgtgcaacagagtgagactccatctcaaaataaaataaaaagccataaaaaaccctagcaaagcttaaaggatttgtttaaactgtgtattagtatgtagtataaatttgacagggcagtggctagaaaatattaaaattacagaaactctgggatttaagtttttttttttttttttggtaagcttagaaaaaacaaaactactagtactgcagtggcatagacaccagaattctatgtagggttgccaccttgccgcagatctgttcagattcaccctttttggaggacttatttagttctgatcctaccttggagtcctgcctcagataactgattagaagagatcagagttttggctggtgaatcctgttgcctttctagagctggtgcttacaatttcctgaaagccaaaagctgataaatgggataaataaggtatatattttagggtgctactatttaaatgttctattaaaaccagtgcttgcagagacattgtatttagaaacttgttttctatttctgcagatacagtacttgctccataagtcacaaaaaagtaaatataaacagaataaaatcgtgtctaaactacattaacctctttttatatctgtttcatctgcctatatttagcttttattctttataattttttaaaaaatttgatgacagagaaacacaagaagaaataaaaatgctgggccctttatctaaatcctggaaattattaaacccttagtaccagctcccatggtgttatgagaattaaatcacataatgtgttatgcccagcacagtgctctgtatcacactcttgagcacatagtacctgcttaataaacattgcattagtacatgtgtacatgttgttttttaaatccagacttattcagacattgctgcattctgtttcctctgtaaactttaaagagccagcaaagaatataaaactttaacatggagatggattgttcttgtttgtaccagaagtatttggttgcaacaagagtgctgagtgtaagggaccctgtgctgtgcctgcttctgtaactaatggtaataatgaaccaatggggagcaacaccagcatttataggggattgtttaaaacacccattcatggacgcttttcaaacctgcagaatcacattacataaagtggggccaaaattaccaagtgatttataggctctttaaagcttgagaggcaataattagcttagggattatcagcccaggcttctcattaggatcaaatggccaatttgcagaaatctcttgtgccctccccacagcttctgtttattgttctgggtggaagcatccatgttgttttaatgaagggcctcatgtgaatctgaggtgagaccagaatctggtatgaggatttcaaaatacattcatgagagttaagttccacctttggactaaagggtggtcacagggcctgttctctttgggtttagtagggacaggtcagtgtggtgcatatttccattactgtagcagaaattgctggtgtctgtggcaggggagggcacctcaggacaggaaaggagaaacttatattttcatcttcatggagcagctcattgtttctgaatctcttctgttttaaaggacagaaatgggtggatttttctgtctttttctgctggttgatgttacgctagctggtaaacatgtggcactgacacctttaaaggcatattctcaagatgcaggggtaatttttttagagaatctcatctgagaaggaattccagagaagtaggagatagaaaaaacaaaaaaggcttttcttcaggtaaacatgcctcagctgaaatgctgtgtccactctgcctcctggaatgccatgcatttagtacttgcaaacttttatttctctacttgtgtttttccttcctaagtagtttggtttaagtacttcttaaaattcttatgatagtcaagggtctctgaaaaatgtttctttcctgtatcccagagccttctcttctttctctacacaataacttcttatatgccatgcagatttttcaacaagtattcatgatttgcaatattaaaaatgttccctttctggctgttgaacatggaaagatgtggatactcaagatttctattggggaaaactgtggtccttagtaaagatggagaacatgtaaagttgaggctctattcctgtgttccattagctgtatgcagaacaggattaagaaattgcttatatatgtcaggtgtggtggctcatgcctgtaatcccagcactttgggaagtcgaggtgggaaggccacctgagatcaggagtttgagaccagtctggccaccatggtggaaccctgtctctactaaaaatacaaaaattagccaggcttgttggcaggtgcctgtaatcccagctactcatgaggctgaggcaggagaaccacctgaacccaggaggtggaagttgcagtcagccaagattgcaccattgcactccagcctgggggacaagagtgagacttcatctcaaaaaaaaaaaaaaaaaaaattgctcatttaaatgtgatggcatttattactcagaaatttctgaaaaaaattattaggagatacctgctctctagggtgctaaatgaagccgacttaaaattactactaaaaattacagagcataggatttatctgtattttgtggtttccataaaacaaatgattctttatgattaaattcagattttacttacttttttaaaagaggaatatttcaacagtgatgctgtgttctgtgtgcattagcacatcataaaaattagtcctaatgcagttaatgattcacttgcttaaatagccctctggcagattttttcactatgtagctagttatttttctcttcattattaagtatgtttatgcagctgatgtgcataaaccatcacatttaatctggcagctgtccttttttcttatttttatctatatatttttctttggaaaatgaaggttcttatctttgtttacaggtcagaaaaactgggaaaaacacaggctcttccacttactggctgtttgacaaaatatcctccttctttggccaaaaacattgacattattgatgagcttgttagaaattcaaaaaatcagactttattccagatcttctggaaaaaaaaaccctgtataacaaggtattcagcttattgcacatattaaaatttgagaagtgtcttctaactcaacatgtcattttcatctgaaaaatattcacaactctttccatatgatgtaaatatagcactcaaaaatgtacctgttcatgttcatgcccttaaatttatactttattatctagaaaaatatatgaactgatgttgtggatcttatgcttctcttttttctcagagttagagaatattttggagagtatttctgtgttgaaaattattttattggataattttcatcagtactataagtcagaaccaggtgtctttactctctcatttcaccttaagtcaaattaaaaatttcattcatggtcacttggtgaaaatgtgtgtgtgtatttttcagaggacattacaattcagagatgtggccatagaattctctctggaggagtggcattgcctggacacagcacagcggaatttatatagggatgtgatgttagagaactacagaaacttggtcttccttggtgaggacaacttgaatatataattcataatatacacaaaaggtttatttctcttttttgtagaatgtgttttagtaatttgttctttttataaatgagtttcagatccagtttttcaagaaaatcttcagaatttgtgcatttagaaaagaattacttccgtgcctcatgcctgtaatcccagcactttgggaggctgaggcgggggattacctgaggccaggagcttgagaccagcctggccaactaacgaaagtacaaaaaattagctgggggctgtggcacacacctgtaaccccagctacttaggagggtgaggcaggagaatcgcttgaacccaagaggcagaggttgcagtgagttgagatcatgccattacactccagcctgggtgacagagcaagtttccatctcaaggaaaaaaaaaaaagaaaaaaatttcttcaacatgtttcatctaaatataaactttccacatttctgagttgagttgtatttttcactctaaattagtggtaattccagaaatttattgacataaaatattgcaacctccctctcccctctcccctctgcctctctttccacggtctccctctgatgccgagccgaagctggactgtactgctgccatatcggctcactgcaacctccctgcctgattctcctgcctcagcctgcctagtgcctgcgagcgccgccacgcctgactggttttcgtacttttttggtggagacggggtttcactgtgttggccgggctcgtctccagcttctaaccgcgagtgatccaccagcctcggcctcccgaggtgccaggattgcaggcggagtctcgttcactcagtgctcaatggtgcccaggctggggtgcagtggcgtgatctcagctggctacaacctccacctcccagccgcctgccttggcctcccaaagtaccgagattgcagcctctgcccggccgccacccagtctgggaagtgaggagcgtctctgcctggccacccatcatctgggatgtgaggagcccctctgcctggctgcccagtcggaaagtgaggagcgtctctgcccagccgccatcctgtctaggaagtgaggagcgtctctgcctggctgcccatcgtctgggatgaagtgaggagcatctctgcccggctgcccatcgtctgagatgtggggagtgcctctgccccgccgccccgtctgggatgtgaggagcgcctctgccccgccgccccgtctgggatgtgaggagtgcctctgcccggccgcgaccccgtctgggaggtgaggagcatctctgcccggccgccccatctgagaagtgaggagaccctccgcccggcaggggccccgtccgggagggaggtggggggggtcagccccccgcccggccagccgccccgtcctggaggtgaggggcgcctctgcccggcggtccctactgggaagtgaggagcccctctgcccggccaccaccccgtctgggaagtgtacccaccagctcattgagaacgggccatgatgacaatggcagttttgtggaatagaaaagggggaaaggtggggaaaagattgagaaatcggatggttgctgtgtctgtgtagaaagaggtagacatgggacacttttcattttgttctgtactaagaaaaattcttctgccttgggatcctgttgacctatgaccttacccccacccctgtgctctctgaaacaggtgctgtgtccactcagggttaaatggattaagggcggtgcaagatgtgctttgttaaacagatgcttgaaggcagcatgctcgttaagagtcatcaccactccctaatctcaagtacccagggacacaaacactgcggaaggccgcagggtcctctgcctaggaaaaccagagacctttgttcacttgtttatctgctgaccttccctccactattgtcctatgaccctgccaaatccccctctgcgagaaacacccaagaatgatcaatacaaaaaaaaataaataaaaaataaaaataaataaaagattaaaacacacacacacacaaaaatattgcagcttccacctgaaaatctaattgccaccaccaatttttgattcagtagtaccaggcagtaaaattaagaaacctacaaattgaaagtattttcttttttttttttttgagatggagtcttgctctgttgcccaggctggagtgcagtggtgcaatcttgggttactgcaacatccacttcccaggttcaagcaattctcctgcctcagcctcccgagtatctgggactacagatgcacatcaccatgctgggctaatttttgtatttttagtagagatggggtttctccatgctggccaggctggtctcaaactcctgaccttgtgatctacctgtcttggcctcccagaatgctgggattacaggcatgagccactgcaccaggcaaattgaaaatattttctaaatatttagaaattgctgttataaatttgtattttggtattaatttaccagaatattttgtcacatcgtctttgctgagcacattactagcttgtaattggagaatatgagcaagattcatgttatttatttttgataaaacaggtattgttgtcttaaagccagacctcatcacccatctggagcaaggaaaaaaacctttgactatgaagagacatgagatggtagccaacccctcaggtaggtgtgagtgaaaatgaatacaacagatgacacaggtaagaggtcccaaggtgaaagagaaagccagtccttaaagtgtgattcaggaagctgtgttccaaagaaatacttcctgggcagctgttttatttatttatttatttattttttaaattttgctctcacaaaggggcatcttctgtcttatgcttttaaattctctaaaaattctacttttctttcagtgagcttccttcaagttcacagtgagagccaaagtcctcttcatggcatataagagactgcacaatctggctgctttttcattgttttggggacacacaaatatctgcatgattttgagaaactaaaactattttttagttctctttttgcatcaggtctgaaatatgtgagagtagtagtttctgttgcatttttttgttcatttttgttcacagtccattctatttttattatgacacagtcttgaaatatagtttgaaattttaagtatgatatccttctgctttgttctttttcctcaagattgctttggctattcaaagtttgttttagtttcatgtaaattttagaattgtcttttccattactgtaaaaaaaaccactgcaattttgatgggaagtttattgaatctatagatcactttggataatatgaaactttaatgatattctttcaatccgtagacataaatattttaaaattaattttgatcttctaatttttttatttttttactgtaaacattttttacctccttggttaatgtttttctcagaaatttgttatttaatgctacattaaataagattttttcttccttatcagatagtttgttttaagtatatgaaaccatacatatacttgtgtgttaattttatattttgctaatttactgagtttatttattagtttagacaggttttaatgtactgtttatggttttttaaatataggattctatgatctacaaacagcaactgttgacctatgtttcttcatctgaagaaatccataattttagattcagatatttaggacaatatgctagaatgttcatggtatgcctgaagtaaattagataatttgtagggacccatatttactaaactagttacttatgcatttaagtttgctgcaggcaaaaaggaattataggatttttatttatttatttatttatttatttgtttgtttattttcttttgagtggggctttcactctttttgcccaggctaaagggcaatggcgtgattttggttcactgcaaccttcacctcttgggttcaagcggctctcctgcctcagcctcccgagtagctgggattagaggtgctcaccaaaacacccagctaattttttgtatttttttggtagagatggggtttcaacatgttggcaaggcttgtctcaaactcctgacctcagatgatctgcccacctctgcctcccaaagtgttgggattacagccatgagccaatgtgcccggctggattttttcatttctgtgaatactggtacaatacgcatggattttcagttatgtcttccaggtcctgtgttgcatattttgtttttttgttattgttgttttcttttcttttcttttctttttgagctggagtctcactctgttgtccaggctaaagtgcagtggtgtgatcttggctcactgcaacctctgccttctgggctaaagtgattctcttacctcagccttccaagcagctgggattacaggtgcatgtcacatcaccaagctaatttttatatttttagtgaaatggtatttcaccattttggccaggctggtctcaaacctctgacctcaagttatctgcccatatcaggctcccaaagtgctagaattacaggcttaagccactgcacctggcctgtgttacatagtttagatatagatttataaatgaggaacatttataacattttaaaataatggctgcgtctttgttttccaccagcaatcaacattggttttatttttattgcacctaatgggtgtgaggtgattttgttggcattgtgcttttttttgatttctctacaaattagtaattttgtatgttctttcaaatgtttttttcccttttgtgcattttatgtcttgtatttagtttaaaatatattattgtatcattcaaggaaataatccaactttattttatcagtgttgacattcagttttcaacatcattttttgaagagattatttctatttcatatgcatggcaactttctggaagattatgtgatcatatacagaagggtttatttctgggctctctattctgttctttcatctgtttgtctttgtgtcagtatcacttttttatgttactgtaggttttaactgtaggttgtattgacatctttgaaaaataaaatattttgcccctgagcaagaatatgttgaagagtgtgtttcatattcacatatttgtgaatttgccagtttgacttttgcttttaattcttaatttcattcagtttttgttagaaaacacacagtgtataattttagtgtttctaaagtgattggttgttgttttgagacaagatcttactgtcacagtggcataattgtggctcactgtagcctcagactcctgggctcaagtgattctttcttttttttaaattttttaaatttttttattacactttaagttttagggtacatgtgcacaatgtgcaggttagttatatatgtatacatgtgccatgctggtgtgctgcacccattaactcatcatttagcattaggtatatctcctaatactaaagtgattctttcacctcagttttttgagtaggtaggactgtagacatgcactaccatgtctggctaattgtttacttgtttgtagtgttaggatctcactatgatgcccaggctgttctcaaacttttggcctcaatggatctccaaagtgttaggattataggcaagagccatggcacccagtagatatttttaaatttaataaaacttggtatatgtcctaacagaatacaccagaagcaaataagaatattgtatattatcttggttttgactggagagttttgtatgtgtctttgaaccctagttggtctataatatggtttggatgtccatgttgtccaaacctcatgctgggatataaatcttcaatgttggatgtgggacctggtgggacttgtttgggtcatgagggtgaatttctcacgaatggcttggtacatactcttcataaccaaaaagtttacactctatcaattcaaataagagctggttcattaagagaacttggctccttcacctcacacttgctctgtctcttaccatgtaatatacccagttacactttaccttccaccatgattttaagcttcctgaaatcctcatcagaagcagatgctgacacacacttcttgtacagtctggtgagctgtgagtcaaataaacattttttctttataaattatgcactctcaactattcttctatatgtaaaataattaatatggtctataatgttatctcagctttctttttcttattttttatctgagttttctatttattattgcaaatggggtcttgatgtctacaatgattatgttgctatgtatgtcttgcttcacttttgtcaatatttgctttatatattttgaagccctgatgttatatacacatatacatagagatagataagtagtatagatccctgctaaatcaactcacttttgccataatataatatcaatcttttctcatggtagtacttgacttaaagcatattctgtctaatataattatgaccacctcactcaattgtggttactatcttcatggaatataactttttttcattctgttaatttcagcctatttgactcaatgttaaaatgatctctcataggcagcatagtgtatactttttgaaaaaccattcaggcattctatatctttttctttatataattttatttatatgttcatttatttattcattttatttaattttattttttgagatagagttttgttcttgttacccaggctggaatgcaatggtgcaatctcagctcactgcaacctttatttcccgggttcaagcaattctcctgcctcagcctcccaagtagctgggattacaggtgcatgccaccacacctggctaagtttttgtatttttagtagagatgtggtttaccatgatggccaggatcatcttgaactcctgacctcaggtaatctgcccacctcggcctcccaaagtgttgggattacaggtgtgagccacagcacccggcctcagaggcatgatcttggtcactacaactctgccattacagagtctcactctgtcacccaggctggagtgcagtggcatgatctcagctcactgcaacctctgcctcctgggtttaagcaattctctgtctcagcctcctgagtaactgagattacaggtgcctgccaccacacctgtctaattttttctgtttttagtggagatggagtttcaccatcttggccaggctgcttttgaacttctgacctcatgatcaacccatgtcagcctcccaaagtgctgggattactggcgtgagccattgcgcccaaccagcaatttacttttaaagacacaatattatactggagagcaggaagagctctgttgggtataagtaacagacttttctttttcttctatgtggctctttgcattgtgctcacctggggcccttcatccatttaacccatttataaattttttacaaatgtattttggtcagtatgtttttgttacctttatatgtccaggaagaaattacagcttgtggtattttgctatgtcatcttgcttatgtagtttgtataattttataggttagatttgtaaagtatatttatctgagtctagcaattgaagtaatgtgtttttattgtttctttcagttttgtgttctcattttacccaaaatctttggccagagcagagcataaaagattatttccaaaaactgatactgagaagatatgaaaaatgtggacatgagaatttacagttaaaagaaggctgtgaaagtgtagatgagtgtaaggcgcacaaaagaggttataatggacttaaccaatgtttgacaactacccagagcaaaatatttcaatgtgataaatatgggaaagtctttcatcaattttcaaattcaaacagacataagataagacatactggaaaaaacttttcaaatgtatagaatgtggcaaagctttcaaccagtcctcaaaccttactacacataagaaaattcatactggagagaaaccctacaaatgtgaagactgtggcaaagcctttaacttctcctctaaccttactacacataagaaaattcatactgaagagaaaccctacaaatgtgaagaatgtggcaaaaccttcagttggtcctctattcttattacacataaaatgattcatactggagagaaaccatacaagtgtgaacgatgtggcaaagcttttaaccattctgcaactttttttcgcataagaaaattcatattggagggaaaccatacaagtgcgataaatgtggcaaggcctttatttcatcctcaaaccttagtagacatgagataattcatatgggagagaaaccatacaaatgtgaaaatgtgcaaagcctttaagcactcctctacacttaccagacataagatagttcatactggagagaaaccctatgagtttgatgaatgtgggaaagcctttaaccagctatcaacttttactaaatatgagaatttatatggaacataaaccctacaaatataaagaatgtgacaaaacttttaggaagttctcaacccttattatacagaattcatactggacagaaatcctacaagtgtgaagaatggggcaaaacctataacaggttttcaattctttttggttttttttttgagatgaagtttcactcttgtcacccaagctggagtacaatgccacgatcttggctcactgcaacctccgcctcctgggttcaagccattctcctccctcagcttccctagtagctgagattacagctgcctaacactatgcccagctaatttatatatttttagtagagacacgattttgccatgtttgccaggctggccttgaactcctgacctctggtgatccacctgctttggcctcctatagtgctgggattataggcatgagccacgatgcccagccacaagttctcaattcttaggagacttggtgataattcatgctgaagaggaactctacaaacctaagaaatgtgactgacagagtttttaccaacacctccaacttctctatacataaaaataattatactagtgtgaaaacctagagatatataaaatgtgacaaagcctttatatggttgccacactcgattgtagttaagataattcatattggcaaaactcctacaagtgtgaaaaatgtggcaaaacttttcatccgttcttatactttatttcacaggaaagctagtatccttgagaaaaattgtacaactataaggaatatggaaaacccattaattcctactcacatcttactcaacataaaaaggttccttttaataaaagcattaaaagtgcaattacagtcaagaaatctttcagaaagtataagcatttaatgtgaagaagagtattgtgaagacaactattacaaatataaagggggttatagtacatttacttgtatcactgatcctattgcacacactttgcactagaggaaaaccttgaagcagttgctcaagctttgttcaacaacagggaatttatattggagatgagtcctgcaaatgtaataagcttagaaacacttattttttttttcagaaactacagcttagaaaacaccagagagtttataccaaaatataattttgcaaatgtggtaaatataaaaaactaattcaaaatagaatgtatttaaatatcagagaatttacagtagaataactaaggcactgacacttcagacattacactaaatcagagtgttgagtataaaaactaatccacaactacagtttttagataaatgatttgcatgtaactgtaaaaggagtagatttttggaagcattgtaattacattgaaagtatacttgtttccttgaataaaattttttgaaaactgcataatgatgtcatacagcttttaaattactttacgctgttattttactcttattcacatgtgaaaggacgtgataaattgcttctgcatcagagatattagagatttttgaaaattatttggacattatgactttttctataaaagagtaaggacattaaaatgtaagatgcataatgaaaatataagcggagaggctttttgtagtaaacctctattaagtaatgtataaggtaaatgttcagagcaatacttttctacattatagtgacataaataattatagttaaaagtatattaaaataaattagtatattattttactaattgtagttttatgtaataaaatgcagtacatctaacaattgttagggctgggctcaatggctcaaacctgtaatcccaccaatttggggggccaaggtgggcagatcacctgaggtcgggtgttcgagaccagcctgaccaacgtggagaaatcccgtctctagtaaaaatacaaaaaaattagccagccatggtggtgcatgtctgtaatcccagctactcaagaggttgaggcaggagaatcgcttgaaccagggaggcagaggttgtggtgagccgagatcatgccattgcacaccagcctgggcaacaagaacaaaactctgtctcaaaaaaaaaaaaatagttagattatgtgtgaactcaattttattattattttttaccatgttaatactattgtgcatttaatgaagcattattatgccactaactttaacctatcccaccttactcaagggtgtagctacaagatggtagcaacatactatttggtacatagtggaataacatctctagttatcactttgccagtggcattaaactgcaaaagagttaaagaatattgttcccatagattaaatttttactcttttttcttatcaaaatttgttattgtatttgtgggtatatagtatgtgtatgtatttatgccttatatggcatattttgattgaggcctacaatatgtagtaattacattagggtaaataaggtatccatcacctctagcgtttatcctttgtattaccaacagtataattatatgctttcattattttaaaatgtacaattaaattgttattgactacaggatttttttatggtcataataattatacaaaaatataaataaaatacagccaggtgcagtggctcatgcctgtaattccaacactttgggagaccgaggcaggtggagtacttgaggttaggagttcaagaccaggctggccaacatggcaaaaccccacctctactaaaaataaaaaattagccgggcatggtggcacatgcctggaggctgaggcaggagaatcgtttgaacgcgggagatggaggttgcagtgagccgagatcacgccactgcactccagcatgggtgacagagtgagactccatctcaaaaaaaaaaaaaaagaagaaatacaaataaagtccatacatttctgagtcctgaaaaataattaataaatatttgtcatatagttttctttgaacatgtggtctctctgcctgcaagcatatagacttttagttttaatttacatagagttaaatatactcatattactctgaagataaaccttaggtgtaagaaaaatataaagtgagtgtttttgtctgagtatgagtttgtacacattttcagaagcaaagagcaattattgcaacaaaggaaattattttaattaggtgactaactaaacaccttgaaaatgctgaaagcaaatctatactttctgctttgtattcagtttattaatgtaaactgttaaggcttatgattcagattctccccggaatctgcctattaaagcacagacaactttgtctccagaaacaacactcttgagtacaacaataaaacccctcttcaaacagaaaaaaaaataatttttaacaattacctttataaacattcaacaaaattaaataattggatatatttttattgttctgtgtgtgtgtgaatgtataaaatggtgcatacaggaaaaataagccagaagaaagatgttagttaatattcacagtgaataaaactggaaagtagttaattattaaatccagatgatagctttgtttatgtagataacaaaagcagcagaaagacttttttttttcccagatgaagtcttgctcagtcgcccaggctggagtgcagtggcatgatctcggctcactgcaacctccacctcttgggttcaagcaattctcatgcctcagccttttcagtagctgggattacagtccgtgccatcattcctgactaatttttgtagtttcagtagagacagggtttcatcatgttggccaggctggtctcaaactcctgacctcttgatatgcccacatcagcctcccacagtgctggtattacaggcatgaaccaccgtgaccggcaaaatactattttaaaagtttatttaggtggatagacaacattctaagataataccctggattctcagtctgttgcacacctgctgtgtaatactctcctcttgagtttaaaaacatgtgtgactgtggtgggaaatcattcatgatattaggttactcatgtgttaactttgtgtttatcaaaatggagattatccttattgtgctaaacttaatcagaggtgcttttaagagaaagagacacatcacagaaaaacacccctgctggcctgaaagtcagtgacttcttcgtggaacatgtaagctgcttatggtggccatatggcgggaaacatgtttgtttattgtcatcattcctgcctcctgtatgttgattccagtaaggagaataagaggatcgtatggcagaggggaaaaaaaggactctcattcatgcaagaaataaacacctctcacctgggatagcttaagagaaacaggagaccacaacaggtccacattaatgggaggaaaagggtaacctgggtaaaagtgctcactggcattatggaacagtatttagtaagctgtagtgaatgatcagcctctgggataccaatagtctaccaacaaggctgaactcattctatttcaatcagcatgtctgcaccattctggcgacccaggtttacactattcattgaagaaataccatgaagaccagtgggtaatgtcctagaattgaacttacttcaaaaagcatacctaattgtttgtttttacatttgaaaaacttttaaaacaatgaacttataattaacttctaattacagaagattctactgtactgttacatgattaaattgtaaacaccttaatatgaagattttttgaatgcatgattagttatgtagatagtttcttttagagtcacatgaccaaagtaacaattagagaaaacatttgaaatgagacaaaattaaccaaaaccacatcttttcaaaggcttggcataattgccatatttatggaaatggccagatgactaacaagaaacaaaaagattttggctttgctcaatgattgtttttgaccttttgaaatctaaaatcctggctaaagtattcaaagggaatattttgtaggtggcttcccagggtttccaagtaaatgaaggagggattctctctctgtcacccaggctgcaatgcaatggtgcattctcatctcactgcaacctccacctccctgattcaagcaaatcttccacctcagcctcccaagtagctgggataacaggcacctgcccttatgcccagataatttttgtatttttggtagagatgaggtttcaccatgttaaccaggcttgtcttgaactcctgacctcaggtcattcacccaccttggtctcccagagtgctgggattacaggcatgagccaccatgcccagccggaagaattttgataggcagaaaaatgcagattatatacactcattgctctactctgatttgcttcaacgctgaaaaattgaagattgtaaatgtagtctcaatttagagaaaattatcaaaatatttatttttcaaaaaagcaaatgtataaaattaatgggtatcaggtgtcattagctgctaaaaaaatagtatgactaaatttagtaagtatctagctatgcaaataacagcctaattaaattaacaccctaataggtgcatgtggaaagcattgctgtgcactgtggtgcacccagactcagcattttcttctgcctcttcacagagataccaattccccctgagttactcagtgtccatactgttgttagaaatgcttgttctctggtgccataaagaaatagtacttgaaaataaatttaattttcttagcaaggccattctttttgcaaaaagggcacactcaccagcagttttgctaccagagtacactgaacaaaagagacagggtcatttataacctgatgtgtccaccctacttttatgtttggtttttattggctgaaaagagacttcacattctgtatttttcccgattgtttagcaacttagaactttttttttttttttttttttttttaagacggagtctcgctctgtcgcccaggctggagtgcagtggcgggatctcggctcactgcaagctccgcctcccgggttcacgccattctcctgcctcagcctcccaagtagctgggactacaggcgcccgcaactacgcccggctaattttttgtatttttagtagagacggggtttcaccgttttagccgggatggtctcgatctcctgacctcgtgatccgcccgcctcggcctcccaaagtgctgggattacaggcgtgagccaccgtgcccggccaacttagaactttttaaaggaggcaaatgcagaggagaacaaagaaaggaggaagtaacttgtggaatgctgagacaggtaaaaacaccttcaaataaggaagagtaacaggctgtgacctaatgcttgcttggaccagtataagcatgccaaggcaaatatttaggctaaattatggaagctaagaacataaagtccattgatttttttgttatggctagcagatatttaagaatgttagcacaggtctttgaataaactttgcttctaagagaagttactatttattcctaattagacggggaggaaagtctttgaagaggaacctctacttcactttttatactgggaactgagaatgctgtgttcagagtgattaccgaaaacatggttaatacacttcttccatatgataataaaatgttataaatcttactctgcctcagaaaagcttttactaaaacattatctatagtactcaattagagttcatggaaaatttcaatattccaaataattcagacagttaaatgtcaatgaaatcccataaaacatttgaataagataagtcttcttagcaaataattttatattactggtaaatttagaaaaaaaaaatagaaaaccaggccaaatgtggtggctcacacctgtaatctcagcactttgggaggctgaggtgggtggaaatcccatctctactaaaaatataaaaatttgttgggcgtggtggcacatgcctgtaatcgcgggtattgagaaggctgaggcaggagaatcgcctaaacctgggaggtggaggttacagtgcgtggagatggtgccactgcactccagcctggatgacaagagcaaaactccatctcaaaaaaaaaaaaaaaaggatttttttttgtttttttttttctgtgttgacttactttacttagcataatatctttcaggttcatgaatgttgcaaataacaagattgtcttactttaggggctgaatagcatttcattgtttacatacaccatattttctctcttcattcacttcttgatggacacttagattaataccttagctattgcgagtaatccacttctttccttctcttttgtttttgtttcgttttgtgtgagacggcgtctctttctgtcgcccaagctggagtgtagtggcatgatgtctgctcactgtaaactctgcctcccaggttcaagtgattctcatgcctaagcttcctgagtagctgagattacaggtgtgtgccaccacaccaggctaatttttgtatttttaatagaggcaggctttctttatgttgaccaggctgcctttcatttgtttgtatatttctttctccctttccttctttatttctagaagtattttacttttaaaatataaattatgactgttataaaccttcatttctctgtctttgcttactattatggctgattaaaaataagttttttgaaatttcctggataaagttattatttcattattaacataacgagaaaatatagaaaggaaaaccaacatttgttagtaaaacagaaattatctagctactggtagtgatttagtctctcacccaacatgaatgctacatcttggtgtcatctctcccagtcgtatgaaagaggctactgatcaaattggtcagcataaaattttgtgaagtttaacacctttgttctaaaaattaagctgatctattaccaaaaaagtagattttttgatatgtataatttgactctatttaaattccgcagaaaaattaaactgacaacatatatttaaaagttttttgagggctgggtgcggtggctcatgcctgtaatcccagcactttgggaggccaaggcgggtggatctcgaggtcaggagattgagaccatcctggctaacacggtgaaaccccgtctctactgaaaatacaaaaaattagacgggagtggtggtgggcgcctgtagtgccaggtactcgggaggctgaggcaggagaatggcgtgaacctgggaggcggagcttgcagtgagcttgtgccactgcactccagcctgggtgacagagcgagactccatctcaaaaaaaaaaattttttttggaaattaaaaatgcttaagaaacatatttatagaaactaaaagtaaaaataattttagattcttagagaacatctctaaaatacttcaagttatcctctgagagtatatatatatatatatgtatatatatgtgtgtatatatataaacacacacatatatatacatatatatatatatatacatatgcatgcatatttttttttgtttttttctttttttgagacagagtttcactcttacccaggctgaagtgcaatggcagaatctctgctcactgcaacctccacctcccgggttcaagtgattcttttgcctcagcctcctcaatacctgggattacaggcactcaccatgcctggttaatttttgtattttcagtagagatggggtttcactatgttggccacagtggtctcgaactcctgaaatcaagtgatctgcttgcctcagcctccccaaagtgctgggattacaggcgtgagccactgcccagccaagtgttcaacttttctgcatcaattatctcagctcagaaaatttaaatcagccaattagcttacctcaggggattccaagcagctcattagcactccccaggagaatccaatcaacaaattagcttagcccagctgattagcccaggtgatttcttttctttacttttctttttcttttttttttacaggaacacagatttgatgttttaataaaaaaaaaaatacgatttctgcaaaaggtgcttaacacggcccaggacgggctgtccggtggagtcagccctaggacccctgaaggatgcataaagacagagccggctcgccagcacgctcctgccagcaccgggacccactgcgagccactgcggggtgtccttcattaaaaaaaagtctggattgtgacattgcaaaaggagtctgaaagccatatgcccaattcctgaatccctacgttagaactgagagtttaggctgggcacggtggctcacgcctgtaatgccagtattttgggaagctgaggcgggtggctcacctgaggtcaggagttcaagaccagcctgaccaacatgatgaaaccccgtctctaataaaaacttgcccgtaatcccagcactttgggaggcctaggtgagcggatcacgcggtcaggagatcgagaccatcctggctaacacggtgaaacaccgtctctaataaaaatacaaaaaaaattagctatgtgtggtcatgggcgcctgtagtcccggctacttgggaggctgaggcaggagaatggtgtgaacccaggaggcggagcttgcagtaagccgagattgcgccattgcactctagcctgggcgacagagtgagactctgtctcaaaaaaaaaaaaaaaaaaaaaaaaaaaaaaaaaaaaattagctgggcatggtggcgcatgcctgtaatcccaattacttaggaggctgaggcagaagaatcgcttgaacccgggaggtggaggttgcagtgagccgagatcgcaccactgcactccagcctgggtgacagagcaagattccataccaaaaaaaaaaaagtgagtgcttagctggagtgaggaggaaatactgaattcctaggtcaggaattcatttcattttcaccaagcgcagatatcccagctcctgaacaaggccaagaccgagggtctggcaccgggcacgtgtaagaaaggactgttttaagaaccttattacacaaagctcttatttctggatccaccactgcttacatttgcacccagacaccacttctaggtgcaagaagaaagatcaggacatagagaaaaatgcacacagaacgatgagggaggatgacgagggagaaagcctgcatcagagcactagcccagatgatttctaacagccaactagctttttctaggggacaccaatcagccagttagctcagctgatgtgaatcttataacccgattagtttagcacaggtgattttaaaccaccgattaactcagctcaggtgatttcaatcagcgaattagctcagcccaggtgatttcaatcagctactttatcaacccaggtgaattcaattagccaattagctcagtctaggtgatcccaatcacctaattatctagtggctacagattcattaaggtatgcccaaaattgtaaatgtaaatagcccatgaacaccaagaagaaatgcagggccctatatgctaacctggacagtatgtataacacagctttactgtcactttatttacaaggcctgaaacctgaagctgaagctttacgtttatataaacaacactgtatggctatgtttcattctgacatgctattgagcaaaagagaaggcaattaattctgcatctgcatccttagtatatgctctatattttaaaaagtgggaaaatattgtatgtatacattaatatttacatagatacattcatataagtttgtgagtgtttatgtagctaccatatgtgtacatatattcatacacatacctaagtgtatataaatatatatatgaagctgtaacaatttttgtatttatattcatacaaaataaagatgttgaatgtggaagtattgatagctattgctacaaacagtaatacagaaccttccatacctgtataaaaatattttctctatagactactatatctagaatagtacagaaatagaggaatgctctaatatacatcctgctgcagttaatatattcaaagggagcattgggctttgttttgcacttctggaagatgaaaatttactaagaccattggagttatttactgccatgtcagggttgacttttcttttattgttgtacatagggtcagagatgaaccagccccagtccaaaggtctaacctaaatatgagaatacttattctttctctttagaacttccatcgaacaagaactgtatttatttccaaaagtgtgtgatgtaaaatcacactattgtctttcggtctttgtggcagaagttgggtatttatggtaatgaaaaagaagtctatgtctctttttagaagacagatggtgatggaagcaaatataatggtacatggtacttggccacatttcaaatgggtgatattgaatagtcgctgaagtgccacaggtggcttttatttcccaggtcaaatcttctttgtgaggaaggctcagcccactgttgtcaagcatttctggtaatttctagatagatgaacaaaatttcactgggctggattaatgagaccaggtttaaaaacacccaggttccaggttattaaagacattgttaaatttgtattaaaaaaagtggcatggtgtgcggcttggtttgaataaatcttcactgagctcagtagctgattacctaacctgtaggtaaaggaattggaaaaacctctgaccaagtttattttataggcttctttctgtacatgtagatataaaataggtggctagataaacatatacacatgaaatgagtcacacgtgtatgtctacgtaatgtttatttctgcatatgactctcaaaaaaaaagcctcaggaataaagtcagatgacatctcggtaagctaccctgaagctgaggtaaatcaaataagcaaattagcagaagtcgggtgattgcaatcagtcaatttgcacagctcagatgattccaaccagcgaagtagctcagcccaggtggatacaatcatccaattatctaaatgatgactggctttgtcaaggcaggacccaaatggtggatgtgtacagaacatgcacacattgaggagaaatgcagggcgctgaaatactaacatggacagatgtgttgtacatggctttattttcagcttctgtggtcttgcccttgaagataaagctttgttgatatttacataaaaaacattgtatgaatatgttccattctgacatgttatttagcaaaagaaaaaagaagtaattctacatcagcatctttagtacatgctaaaagattaaaaatgttttttgggaaatttgttttgtataaatatttatatagaaatatttatttaattctctatgtgagtgtttgtcttcctatgtacatttatatctagatgtgtcaatctttgtatcgatatgcattgctatgaatagtaagataaaaagtaacttctggctgggcactggggctcacacctgtaagcccagcactttgagaggctgagatgagtagatcgcctgaggtcaggagttcaagaccagcctggccaacatggtgaaaagccatctcttctaaaaaataaaaaaattagccaggcttggtggcaggtatctatatttccagctacttgggagtctgaggcaggagaattgcttgaacccaggaggcagaggttacagtgagccaagattgaacaactacactccaacataagcaatagagcaagattcaatctcaaaaagcaaacaaaaaaaaaccccaaaatgatgatatgtaaaacctttaaagttcttttatagaatataaaaaatatgtaaattcacatacatctgagagatacaccacataaaataattttaatatcaataacaaactggaaaatatagaggcatggtttatgtattcaactgaagttgttatgaaatttaaaaatattgttttaactttaagatgtatgtcatttccagctgtcaaaatgattacaaagataatatttatagaaagtatgcaaaagaaaacaaaaaataatcaaatcatgccagtacaaaattaaatgaaagttaagaaagtaaataaggaaaagagaaaaatataactactagaaacacacaaaacaatatcagtataactagtaataacaacatcatttccctaagcaatcattttaaatataaattaattaaactacttaataaaatgaaatgtaatcttaggattttggaaggccaaggtaggctgatcacttgatcccaggagttcaagaccagaattctcaataaagaatacaaaaaaggtagctgggtgtgatggcacatacttgtaacccagctacttgagaggctgaatgagaggatcatctatctgagtttgggaggttcaggcagcagtgaactgagcaaatcagcctggctgacagagtgagaccctatctccatgataaatgaggccaggtgcagtggtgcacacctgtaatcccagcactttgggaggccgagacaggcaaccacctgaggtcaggagttcaagagcagcctggccatcatggtgaaaccccatctctactaaaaatagaaaaaattagctggacatcgtggtgggaacctgtaatcctagctactcaggaggctgcagcaggacaattgcttgaaaccaagaggcagaggttgcagtgagctgagatagcaccattacattccagcctgggaaacaagagtgaaactcagtctgaaaatgtatatatatatatatgaataagtaaaattatataaagaaaaagaaatagaatgcctgagtagttttttataaagcatacagtatgctgcctacaaaagattcattttagcaatgagtcaaataggctgataaagtaacagaatgaaaaagatgtatatcccatgagaatagcaaccacaactgagtgaggtggtcataattataatagacataatatgctttaagtcaatactgtcatgaaacaatgattgatattgtattatgataaagtgagttaatatagcagaaatctgtaactataatatttatctatatatatatgtgtatacaacatcagggctttaaaacgtacaaagcaaatattaacaaaagtgaagcaagacacacatagcaacataattcctgtaggtgaatgtttagtaggaaaaactaaaaactgtaatggctgcatagggtcaattcatttcacttgtgcttgttgaattttttcttcaattaattgaagttcctctaatgcctctttagaaagggagcatttactgttaaggtcagaattagcttgtaaagtagaaaaaaggtgagacatagcataggtaggaatgcctaaagatggacaaatccaattaatgtctcctaataaatttgaaaatcatttagagtttttaaattatctctttcaatttgaactttttgaggattattagtactttgttctactttcattcctaaatattgaaagggagtagaggtttggattttgtcaggggctatgattaatcctgctgcagtcacagacttttctaactgttgttagcatagcattacttcctctctagtttcagctgcacataaaatgtcatccatgtaatggataatataactttttaaaattgttctctaactggcttaatagtttttccgacataagtttgacaaatagttgggctatttaacattccttgtggtaatactttccaatggtatctgtccgctggttctttgttatttatagtgggaacagtaaaagcaaatttttcataatcttgggtcactaaaggaatggtaaagaaagaatctgttaaatctatcactattagaggccagtatttaggaataatagttggagagggcagccctggttgcagtgcgctcatgggttgaaatatagcattaacagccctcaagtctgttaacattctccgtttacctgattttttcttagtaacaaacacaggagaattccaaagagagaaggtaggctctatgtgtccctttcgcaattgttcctgtgccaattctataaaagcctccagtttttcctgtttcagtggcattgatccacccaaacaagtttggcagttaaccaaacaaggggaatgggagctggaggctcagcaatggccactcctaaaaatgataccctaatccagttctatctatttgcccttttagttctaaaggttctggttggctattttcattttttcctaatcccttccccaggagatgtccaatttttctcataatttgtttactgttattactatactgttccataggaatagatatttcagcaccccattgttgtaataagtctctaccccatacatagattgagaggaatatgtgtaataataggttgaattgtcccttcttggccatctggcccttggcatggcaaaattaaagaactctgaaaaacttctgaggcagtccctatgccaacaatacccatggaagccttttctttgggcattgtcagggccattgatttaaagcagtaatagagacatcagctccagtatctactaatcctttaaagtctttaccttgaatggttactgtacaaataggtcttttgtcagaaacttgattaacctaatggacagcctttcctgctggattcgtactaccaaagcctcctgttcttttcactgtactacttcctagctttgtgtaaggtagtagtaataattgagcaattctttctcctggagaagcagaccatggagttgaggaagtaataactatttgaatttctctgctataatcagaatcaattattcccgtgtgaacagtgacaccccttaaatttaaactagaccttccaagcaatagaccaactcttcctgagggtaaagggcccctaactcccatggggaccttctttggtggctccccaggaagtaagaaaatgggaactgtactgcaaaaatctatggcagcagtgcctgctgtggtgggggacaattgttgtacatttgtaagggcagtggctgtgccagatatgcctcggtttgttgaggggcccaagttgggcaccccttcctgtttcccgaaagaggttgtccacattttttttattttttatttttttaaatgttattatttttatactttaagttttagggtacatgtgcacaacgtgcaggtttgttacatatgtatacatgtgctatgttggtgtgctgcacccattaactcatcatttagcattaggtatatctcctaatgctatccctccctcctccccccaccctgcccatctttactaaatttagaatgacactgatttgaccagtgaatcccttttttatatcgggggcagatactgggacttttttgttgcttaccggtagtagtctttgcctgctgatttccttttttacattccttttttgtgtatccaaattgcccacaattaaaagagactgagaaatggggcatgttttttcccctttagtccagccatagcttgagctaaatgaggagccttatgtaaattacccctaatgccatcacaagccttaatatattcagccaaatgagccttccctctcataggtctcatagcagcttgacattctgcattggcattatcatatgcaagaagctgtattgtaacatcttgagctgttttgtcagttatagctttatgcacagcctcttggagctgaggaataaaatcagcatatgattctttaggtccttgtaggacagaactgaaagaaggatatttttctcttgtaacatttattctctcccacgcccataagcacacagcatgcagctgagaaatggcaacattctctatcactgcctgattttctaatcacccccaattagggccaactcccattaactgttcaaaacaaacaggcacaggtggctgtgcttgtatgttttctcttgcctgagtttgagcttcatcagcccaccaagttttaaactgcaagtactgagatggagtgagaacagattttgttaaagtatcccagtcatatggtataaagtatcccagtcatacggtattaacctattgtcaagagccatattttttaataaagtttttacaaaaggagaatttggcccatattgactaatggcttgtttgaattcctttaacaacttaaaagaaaaagtggcccaattagctatatttcatccttcttgttgggttatagtaactggaaattgccatgcttcaaagtcaccttcagctctagctttttgaatcgaatttcgtataggaccaccaatcgctccaggttttaatgttgcaactacaggagtggtaagtttctcagctgtttcattttcttgcccattatggggagagggaggatatggccattcacttaattcagcaggtggaatcaatgggctagtaaaacatacctttttcagtttccctttgttttctttaatttcctccagttgctgttcctcacattcagaatctgaagttagttttttacactagtctgcctcttcctcttctgaatctgccttgtcatctgtttgaagtgccccaagagctgcctttatcaatgcctgcactgaccaaacagaaactggaattttggctccgtctttatatgcctttttaaattctctgccaattcttttccattcatccaactccatagtctcatgttctgggaaccatgggcaaaactgctctacagtactaaagagtgtcaataaattctgtgtactaactttcacatctcctctccataataaatgccttagaagtttaaacaagcagaatgtttgctttcattctgtcccattgttaccctggttcttctgagtgcccagcttagcactgagcttcttttagtcatcctcgggtgtcctctgacaatatgtcctctgcttccacaagctctagcgttccttcactggggtcttcatagtcccacattgggcaccagaaatgttggggtgatcaggcccaacaccaggccatgtgggctatgaagtctggcggagtcaaaggattgagacaagacaagttaagagtacttaaattgggtccagggggccaatgctagtatggaggctgtgaaggccccgagctctggaagcccacactatttatcagtgatcagacaaataagcaggtggtaaggacgtgcggatgtggggtaaacaggtgaggacgtgaggacttcgggctagaaaggtagcagtgcatcaagtgtagctgtgatggtttcacattttctttgatgcatacgtaatatgctgtgctacctgacataatggagaacatgtttatgagcctgggagagcaagaaacaaggaatcaacaagtctgtgccattccagaggccaggaggggttttatgccctgagccttggattccatccgagccacgaggggttttatgccctgggcttagattatggtgtggcaaggcagccttccaccctttggcacagagctttgtgttccagaggccacgagggggtttagaccctggacacaggacttgttccaagacccttttacattaggacaaacaagctagtcctgcctcagctcttctaccaacagtgatccacccacctcagctgctcaaagtgctgggatcacaggcatgaaccaccatgcccagtccatttttagtcctttaaagtaaacacagatttgtttagataaaagctcattttaagagcacacaaaagcttagcacaaagataggattaaatttagctatacagaatgataaagactaaaagatactaagattctttgaaagaaacctgattatccaaggtaattatccaatatttgcagactgaagtacttatattgcaaaagcaagaacagttcagtgcataaactgaacagtggagtctgtagttgtaccttgctttctatttattacttcagagcaattagcatagttatgtgtagtgtttgtagacaacctgcattcatatacactaaatagtattttttttttttttgagactgtgtctcactctgctgcccaggctggagtgcactggtatgatcttggctgactgcaaccactgggtcccgggttcaagcaattctcctgcctcagcctcctgaattgctgggattacaggcacccaccaccatgcctggctaaatttttctatttttagttgagatggggtatcaccatattggccagcttgattgtgaactcttgacctcaggtgatccacacacctcagtgactcaaagtgctgggattacaggcatgagccataaagtttctttttttttgagatgaagtcttgcttttgtcccccaggctggagtgcaatggcatgatctcagctcactgcaacctctgcccctcaggttcaagcgattctcctgcctcagcctcccaagtagctgcgattacaggtgactgccaccacacctggctaataataaacagtattttcttttatttattattattattttattttttgagacagagtttcactcttgttgctgaggctggagtgcaatggcatgatcttggctcaccctcagccacacaggttcaagcaattctcctgcctcagcctccctagtagctgggactataggcatgagccaccacacccagctgattttgtatttttagtagagacggggtttctccatgttgatcaagctggtcttgaactcccgacctctggtgatgtgcccgcctcagccacccaaagtgctgggattacagacgtgagctgccacgcccagccaaataaacagtattttctacaatagtatgaataaaaatccacaatacttactttgaatgaatcacttgaatgtttattttaatattgttatttacacttttgaaatataaattgttttaactgaagtatagttgcaatttttaagaatgctacatacattactactagtttactaaaattattcatactcagatatttatatctaatatccaaaaaaaattgctaccaaattgctacagtagatattagtctgacatgtttattactttattcaatagggataattataagtaaacataatttaacatcttttatttcactaaattggaatgctgctattacaaaagaaataaagacaggtaatctggccacccaaaaaccataatagttctcctgttaactatgttgtaagttctaatgtattccaccataagaacatggtcagattctatttcttcatcagaaagtgttgttggaagttttcaggtatatttcaatgtagaacccccattcagtggctagaaaatgagacagcagcagagatggaaaaaaaaaaactataaaattcttgtgaaaatctgccccctttcttcgtaatgctcatgtttctcatgctgagagtagctgtgcactttgggtggttagagagaaattgcttttaggggactattttctggctgacttgatcaatcttatatctaatctgagctttttcataagatctttttaacttctctcaaaataatcttgctcagatagagatctggttttctctccagtgctttgggtgtctgtttcagaagtgctgttagtttcccatggtgtctgaatgagctgggctgtcacagtgagaatttctggagctatctctatctggactcatgctggaaattcagcagtattttttttatgtcaccattataaataaaaattggggctgaaactccactcacattcccattgttgtgaaggtgcaattctacccacgaggcctgcaggctctcctcctgcagctcaggctttactatctaatgtgactctagagtgctgctgtagcaaatggggttcacataaactgtgagctgtgctctcggctgtgcctcagtggcagatggtagaggccaagagaggacactagcaaccaggagaaagcaagcaggagtgctataacccagtgtcagggagtgcagagccactgctccaaaatgtaaatagccaaaatgatagaaccctattcaaccacttttgtagctagtgaaaacctaccttcagcaggcacctggcttcaagctgctaaactaccttctgttatgaagatggaaaaagtttgtccttgaatataagcaattagcatacacagatggcctcttcaacctgcctgtgaatttaggatgaactgtgtatgacgtggtgctgtaaattttacttgtggactaattatggtgatcatctttctttgcagtctcttaagcagattgactatgatgcatgtcacattcaagtttaatggtgtaataaaactgttttctttctgttttactattgtggagtttttttggggctggagaaaattgttcttttaattattgtttccaaacactgcctagaattaccaggcatgatataaacacataaggtgccaaccagaatttactttagaggaaactttccctctcagacttccagtcaactcacacttgtgcaacaaagtgcatgctgtcccctaaatatgcaggcagaactgtgtctctgcccatttggtatctatagtcctctatagttacttctagagagactagaccacatttctactaacttcacagggcaacaattaatcattttatctcaatgactcttgtatcttcagacctgaaactgattcagagaccatggggcccacaatcctaatctgagtaacatgtgtgcattgagtacatatgcagacatgagaatctccactttcctcttttttctcttggtaaattgctcacaaatgtataggtaacacctgctcctactccagccattcaggctctaaatctgcagctccacattttgtatccaggtcttgagatttgggggatagaacatttttgtctaaaaattgcaagtccttttggttatcaaactcagacgttgaaatgaaagtgcagttgtctttcttcccctttaaaatatgtattcatctcttgaaactgtttgctattgccacaagtagatatatattaaactaataatgccacattggatgctatatctcataccctaaaccataataatatatatctaatcaataatcaatgctatttctgtaaataaataaatatttctgacaaacaactttgccattaaaaaaatacatgaaagcagtcatggttcctacaattcagaaacatttagtctagactagcaactgcataaataattgaattatgcatcatatggttggtacaatatatagacgcatccaaaatcttgggctttatttaggccactttctttatgctgttgtgacttctgatgtctaccactgaagagatatttattaacagaagaattgttattataatttctttctttctttctttttttttttttttagacagagtctctgttgcccaggctggagtacagaggcactatctcagctcactgcaatttgtgccactagagttcaagtgattctcctgcctcagtctcccaagtagctgggattactaggccctgccactgtgcccagctaatttttgtatttttaatagaggctgggtttcaccatttttgtcaggctgttcttgaactcctgaccttgtgatccacctgcctcagccttttaaaatgctggaattatgggcctgagcgactgcacactgctgtatagtttctattttttttttaacattgctaactgtacatatttattttccaataaaattaccctaggaaaccttaagggatttgtttaaattgcatattaatgcatagtatacatttaacaggacagtggctagaaaagataaaaattacagaaactctgggatttaagtttcttttaggtaagcttagaaaaagcaaaactggaagtaccccagtggcatagagaacagaattctacatagggtcctcaccctgccccagacctgttcagattcaccctttttggaggccttattttggtctggccctaccatggagtcttgccttgcagaattgattagaaaagatcagagttttagctggtgaatcctgctgcctttctagacctgctgctcacaatttcctgaaatcctaaagcagataaatgggaaaaataaagtatgtatttgagggtcttagtttttaaattttcaatgaaaaccagtggttgcagagacattctatttagcaactttttttttattcctgcagatccagtagtttctgcacaagtcacaaaaaagtaaatacaaacagaataaaattttctctaaataactgaagaaatgaaaatgctgggccctttttctaaatagtggaaattattaaatccttagtaccagctcctaggatgttatgagaattaaatcacataatgtgttatgcccaacacagtgctctgtatcatacccttgagcatatagtacctgcttaataacattgcattagtacatgtgtacatgttgttttttaaatccagacctattcagacattgctgccttctgtttcttctgtaaactttacagagtcggcaaagaatatataactttaggatacagatggattgtccttgtttgtatcagaagtatttggttgtgacaagagtgctgagtgtaagggaccctgtgctgtgtctgcttctgtaactaatggtaataatgagccaatggggagcaacatcagcattgacaggggacttgtttaaaacccccattcatggacccttttcaaatctgcaatcacattacataaagtgggtaaaattaccaagtgatttataagctcgttaaagcttgagaggcaatgcttagcttagtgattatcagctcaggcttcttattagggtcacatggccaatttgcagaatctattgtgccctccccgcagcttctgtttattgttgtgtgtggaagcatccacgttgttttaatgaagtgcctcatgtgactctaaggtaaggacagaatcaggtttgaaggcttcaaaatacattcatgagagttaagttccacctttgcactaaagcatggtcactgggcctactctattttgacttggtagggacaggtcagtgtggtggatatttgtattactgtagcagaaattgctggtgtctgtggcaggggagggcacctgagtacaggaaagaagaaacttatatctttatcttcatggaggagtgtattgttcccaaatctcttctgctttaatggacagaaatgggtgggctttttctgtcttttctgtcagttgatgtcatgctagcaggtaaacatgtagtagtgccacctttaagggcatgttctccagatgcaggtgtaatttgtccagagaatctcagaagaaatccggaggagaaaaaaaaaaaaggtttttcttcagttaaacatgtcccaaatgaaaagctgtgtccactctgcctccttgaatgccatgcgtttagtacttgcaaatctttacttctctacttgtgttttttcttcctaaggggtttgatttaactacttctctaaattcttacaatagtcaaggatctctgaaaaatatttcttttctttatcccagagccttctctttattctctacatcatagcttcttatatgccacacagaattctcagcaagaatttatgatccacaatattaaaaatgtttcctttgtggctgttgaacatggaaagatgtggatactcaagatttctattgaggaaaactgtggtccttagtacagatagagaacatgtaatgttgaggcttcaatcatgtgttccatttgctctaagcagaacaggattaagagaatgcgtatttaaatgggatggcatttattacccagaaagttctgaaaaaaattattaggagattcctgctctctagggtgcttaatgaagcctacttaaaattcctactaaaaattacagaacataggagttacctgtgttttgaagtttgcataaaactgattttctttatggttaaattcagattttaatttactttgtttgggaggaatatttcaacactgatgctgtgttcttgtgtattagtatatcataaaaatttttttcatgtggttaatgggtaatgattcatttggtgaaatagctctctgacagatgttttcactatataattattttttcttcattattaagtatctttctgcagctgatatgcataaaccatcacatttaatctggaagctgttcttttttcttatttatttatttattttattttttattttttttttgaggagtctcactctgttgcccaggctggagtgcagtggtgtggtctcggctcactgcaacctccgcctccggggttcacaccattctcctgcctcagcctcccttagtagctggaactacaggcgcccaccaccacgcctggctaattttttgtatttttagtagaaacggggtttcaccatgttagccaggatggtctcgatctcatgacctcatgatccatccgcctcagcctcccaaagtgctgggattacaggcatgagccacctcacccggcccttttcttatattttactacatttttttctggaaaattaaggctcttatctttgtttacaggccagaaaaagtgggaaaaacaaaggctcttccatttattgaatgacaaaatatccttcttaggccaaaaacattggcattactagtgagcttgttagaaattcaaaaaatcagtcaggtacagtggctcatgcctataatctcatctctttcggaggccaaggtgggctgatcacctgaggtcttgagttccagaccagcctgaccaacatggagaaaaacctcatctctacaaaaaaaaaaattagtcaggtgtggtggtgtatgcctgtaatcccagctatttgggagactgacccaagagaatcgcttgaacctgggatacggaggttgctgtgagctgagattgggccactgcactccagcttgggcaacaagagcgaaaatctgtttcaataaataaataaataaaaattgagagatgtcttccaactcaacatgtcttttccatttggaaaatattcacaactacttccgtatgatgtaaatatagcacacaaaagtgtacatgttcatgtttatgcttttaattttatactttattatctagaaaagtatatgaacggatgttgtggatcttacgctactcttttttcttagagttagagaatacattagagaatatttctgtgttgaaaattattttattggataattttagtcagtcctataagtcagaaccagttctgtttactctctaatttcaccttaagtcaaattaaaaatgtcgctcatggttacttagtaaatatgtgtgtgtgtgtgtgtgtgtgtgtgtgtgtgtgtgtgtgtgtttcaggtaccatagcaatttagagacgtggccatagaattctctctggaggagtggcattgcctggacactgcatggcagaatttatatacacacgtgatgttagagaactacagaaacctggtcttctttggtgaggataactttaatacataattcataatatacgctaaagattttatttcttttttttttttttttttttttttgagacggagtctcgctctgtcgcccaggccggactgcggactgcagtggcgcaatctcggctcactgcaagctccgcttcccgggttcacaccattctcctgcctcagcctcccgagtagctgggactacaggcgcccgccaccgcgcccggctaattttttgtatttttttttagtagagacggggtttcaccttgttagccaggatggtctcgatctcctgacctcatgatccacccgcctcggcctcccaaagtgctgggattacaggcgtgagccaccgtgcccggccttatttctttattttatggaatgttttttagtaatttattcttggcataaaagagtttcagatcccctttttccagaaaactttcaaaatttgttcatttagaaaagaatttcttcaaaatgtttcatcttaatccaaactttccacattcctgagttgagctgtatttttcactctaaattagtggtaattccagcaatttagtagcataaaatatgttgcccctacctgaaaatctaatgtttgattcagtagtaccaggtagtcaggtagtaaaattaaaaaacctacaaattgaaagtattttctaaatatttagaaatttcctttagaaattaatattttggtattaatttactagaatattttattatatcctctctgctgagcacattactaacctgtacttggagaatatgagcatgattcatgttattttttttttttttaataaaacaggtactgttgccgggcgcagtggctcacgcctgtaatcccagcactttgggaggccaaggccggcggatcacgagggcaggagatcgagaccatcctggctaatacagtgaaaccccatctccatcctgaccgagaccatgctggctaacacggtgaaaccccgtctttactaaaaatacaaaaaaaattagccgagcggggtggcgggcgcctgtagtcccagctactcgggaggctgaggcaggagaatggagtgaacccgggaggcggagctggcagtgagctgagatcacaccactgcactccagcctgggccaaagagcgagactccgtctacaaaacaaaacaaaacaaaacaaaacaaaacaaaacaaaacaaaacaaaaaaacaggtatcgttgtctggaagtcagacctgatcacctgtctggagcaagaaaaagaaaaaaacctttgactatgaagagacatgagatgactgccaaacccccagctaggtgcgagtgaaaatcaatacaatagacaacacagataagaggtcccaaggtcaaagagaaagccggtccttaaaatgtgatttgggaagctgtgttccaaagaaaatagttcctgggcagctcgtgttttttttttgttattgttgttgtttattttttaattttgctttcacagagaggcatcttctgttttatgattttaaattctctaagaattctgcttttcttttggtgagcttccttcaagtccacagtgagagccaaagtcctcatcatggcatataagagactgcacaatctggctgctttttcattgttttgggggcacataaatatctgcatgctttttagagactaaaactattttttaagttttttttttcatcaagtctgaaatgtgtgagagtagtagtttctgttgcatttttttgttcatttttccttacagtccattctgttttcattactatatcatcttgaaatatagtttgaaattagtatgatatccttctgctttgttcttttttttcaagatggctttggctattcaaagtttattttaattttatgtaaattttggaattgtattttccattactgtaaaaaaataccattgcaattttgataggaagtttattgaatctatagatcacattagataatatggtgcttcagtaatatttattctttcaatccatagacataaaatagtttaaaatttatttggatcttctccaatttttttcatttttttattgtgaagattttttacccagttggttaattttttctcagaaatttattatttaatgccttagtaattgagtttttgtcttcctctactttattatttttttgagatggagtcttgtactgttggttgcccaggctggagtgcaatggctcagtctcggctccctgaaatgtccgccacccagattcaagctattctcctgcctcagcatcccaactagctgggattacaggcagccaccaccacacccagctaatttttgaatttttagtggaaacgggattgtatcatgttggcacactggtctcgaactcctgacctcaaatgatttaaccgcctctgcctcccaaaatgctgggattagaggtgtcagccactgtgcccagcctcattctctattttatcagatagtttgttttaagtgtatgaaaccatacgtattcttaaatgctaattttatattttgctaatttactgagtgtatttaatagtttagacaggttttaatgtactgtttatggtttttaaacataagattgtatgatctacaaacagcagcattttgtttttcttcaggttcaaaagatttttttattttcttgtctaattctttggccaatacttccagtgctacattaaaatagaagcattgacaatgggcaaaatatagttttgtattggtgtctgaatttgatggagcaaacacatcttcatgttttttgtttttgttttgttttttgtttttttttgagatggagttttgctctcattgcccaggctgaagtgcaatggcatgatctcggctcaccgcaaactccgcctcccaggttcaagcaattctcttgcctcagcctcccgagtagctgggattacaggcatgcaccaccacacctggctaattttgtactttttagtagagacagggtttctccacgttgaggctggtctcaaactcctgatctcaggtgatctgcctgccttggcctcccaaagtgctgggattacaggtgtgagccaccatgcctggccatcttcatgtttttataaactgattttagaaggtaaagatcttttgttgggtccttaggatgataagatgccctctgaatttgtagtgaagaggggctgtagcttggtcacaaggctgctgggtctgcattagggcccacctttagttggcttgttacaggggcttgggttgttgtaattcccattttatttttgaacaaactgcatatccttcaggactttgctctacagggcagacactagggcacatttttgcagttggtttttcacatggtgggccttgtatcaggatgtggatgagtgtggctttcactaagtaccagagagcatttcctcaggtaactgtgtgagtttctatataggcagcactggccatgaactgtggctcaggtaactgaaactgcgtcactgaaccacttcagggaccacagtaaaggccaacttctgcagttatatttttctcatttcctgttttactttcttaattttcatttaattttgtactggtatgctttgattattttttattttcttttgcataaattttataaatattatatttataatcatcttgaaaactggagattacatctgaaagttaaaacaatatgttttaatcttataacaacttcaattgaatacaaagattatgcctctatattttagtttgttattcatattgaaattattttatatggtgtatctattaacagatttatgcagatttacatattgctttttatattctattaaaaaactttaaaggctttatgtgccatcattttttaaaaattattattgagattgaatcttgctgtcttgcttaggacggagtgcagtggtggaaccttggctcactgcaacctctgcctcctgggttcaagcaattctcctgcctcaggcctcccaagtagctgggattgcagacgcctgcacctagccttggtaattttttgtatttcttagtagtgctgggctttcaccatgttggccaggctggtcttgcactcctgacatcaggtgattcacctgcctcagcttctcatagtgctgggcttacagttgtgagccaccgcccccagccagaagatactttttatctcactattcctagctttgtatatcaatacaaagattgacacagctagatataaatatacataggaagacaaatgttcatatagagaattatataactatttctatataatgtttttgtatacaaaatatgttccccaaaagacatctttaatcttttagcatacatctcagatgctgatgtagaattatttgttttcttttgctaaataacatgtcagaatggaacgtagccatacaactttttatgtaaataccaacaaagctttatcttcaagggcaagtctacagaaataagctgaaaataaagccatgtaacccatctgtccaggttagtatttcagtgccctgcatttctcctcagtgtctgcatgttctgttcacatctaccatttggggcctgccttgataaagccacagtgactatttatataattgaatgattggatccatgcgtgctgagcaaattggctggtgggagtcacctgggctgttcaaattggctgattggaatctcctgggttctgctaatttgcttatttaatttacctcggcttcaggggtagaatatggagatatcacctgacctactttatttctgatgcttttatttttgtggggcctatgcataaataaacattacgtagacatacacatgtaactcattttgtgcatatatgtttatctagccatctattttatatgtatatgtacagaaagaagactataagataaacttggtcagaggctatttccatttctttacctataggttaggtaaattctatcagctacttagctcagtgaagatttattcaaaccaagccacacatcacatcacatttttttttccataaatgtaaaaatgtttttaataacctggcacctgggtgtttttaattctggtcacactaaaccagcccagtgaggttttgttcatctgtctaggaactgccagaaatgctcaacaccagtgggctgagccttcctcacaaggaagatttgacctggcaaataagagccacctgtggcacttcagtgaatgttctctatcacccctttgaaatgtggccaagtaccacgtaccattatatttgcttccatcatcaccatctgtcttccgaaaagaggcctaaacttcattttcattaccataaatatccaacttctgccataaagacgaaaagactagagggtgactttacatcacacactcttggaaaaaattagagttcttgtcttgatggaagttctaaagagtgggtgagacattaagtgactaccaggagctagataattgctgttttactaacagatgttcattttcatttccatattgtctcaagttatggtaataataaagtaataatggtatccaggaaatttcaaaaaaacttatttttttcatcagccataatagtaatcaaagacagagaaataaaggtttttaagtcataatttatattttaaaattaacatgcttctagaaataaaaaaggaaaggaagaaagaaatatacaaacaaatgaaaggcagcctggtcaacatggtgaaagcctgcctctactaaaaatacaaaaattagccgtgtttggtggtgcacacctgtaatctcagctactcaggaggctgaggcactagaatcgcttttacctgggaggccgaggttgcagtgagcagagatcgtggcaatgcactccagattgggtgacaaaatgatactctgtctcaagcaaaataaaaacaaaaacaaaacaaaaagaagggaagtggaatactcacaatacctaaagtatggaatcaacttaggtgtacatcaataggtgaatggagaaagaaaatgtggaattatgtacacaatgcaatgctattcagcccttaagaaagtcttgttatttgcagcatcatttatgaacctgaatgatattatgctaagtaaaataagccagcacagaaaaacacacaagcaaaaaaattattttatttttgagatagagtttcactcttctcacccaggcaggcgatggtgcagtggcaccatctcagctcactgcaatctctgcctcctgggttcaagcaattttcctgcctcagcctccctagtacctgggattacaggtgccagccaccatgcccagctgatttttgtatttttagtagagacaaggtttgtctatgttggccatgttgaccaggcttgtcttgaactcctgacctcaagcggttcacccacctcagcctcccaaagtgctgggaggtgagaggtgattacttcttgcatgaatgagattccctttttttccctctgccataggatcctcttattgtccctactggaagcaacatgcagaaggcaggaatgatgacaatatacaaatacgtttcctgccatgtgaccaccataagcagcttgcaacatggctcacctagaagttacttactttcaggccagcaagcgtgtttttctatgatgtgtctctttctcttgaaagcacctctgattaagtttagcacaatcagtgtaatctccatttggataaacacaaagtcaacgcaagaggaacctaatttcatgagtgatttcacaccacagttacacatttttttacgttggagaggaaagcaggtgtgcaacggactgggaatccagggtattatcttagaatgttgcctacccatctcaataaacttttacaatagtctttctgctgcttttgttatctgcataaacaaagatatcatgtgcaaataataattaactactttccagctttattcactacaaatattaacatcttttttctggcttaaattatttttcctttatgtaccattttatacattcacccacacatggaacaataaaaatgtatccacttatttaattttggttaaattttcattaaaatgagtgttaaaaataactttttttctgtttgaagagggcttttattgttttactcaagagtgttattttgcccagtgcggtggctcacacctgtaatcccagcactttgggaggccgaggcaggtggatcatgaggtctggagatcgagaccatcctggctaacaccccatctctaacatcgatgactaacattgagatcatcctggctaaaccccatctctactaaaaatacaaaaaattagccgggcgtggtggtgggtgcctgtagtcccagctactcgggaggctgaggtaggagaatggtgtgaacccaggaagtggagcttgcagtgagctgagattgggcggctgcactccagcctgggcgacagagtgagactccgtctcaaaaaaaaaaaaaaaaggtgttatttctggagacaaagttgcctgtgctttaataggtagattatggaaataatttgaaacataaaccataaaattttacattaataaattcagtgcaaagcagaaagtataaatttgctttcagcattttcaaggtgtttagttttctattactcacctaattaaatttgttttgttccaataattgttcttttcttctgaaaatatgtacaaatgcatactgacacaaacacacttactcacttcataattttcttacacctaaggttcatcttcagagtaatatgtgtatatttcactctatgaaaattaaaactaaaactatgttttcaggcagagagaccacatgttcaaagactatatacacattcaactatataacaaatatttattaataatttttcaggactcagaaataaaaggattttatttctatttctttctttttttttgagacagagtctcgtgggagtacagtggtgctatctcaactcagtgcaacctcggcctcctgcgttcaagccattctcctgcctcagcctctggagtagctgggattacaggcacgccaacatgcccagctaatttttgtatttttagtatagatggggtttcaccatcttgctcaggctgctctccaactcctgacctcatgatctgtctggctcagcctcccaaagtgctgggatcacaggtgtcagccactgtgccaaacccatattctatttatatctctgtataatttgtattatgaccataaaaataaccctgcagtcaaaaagaatttaattgtgcattttaaaataactaaaagtgtataattacagtttgtaatacaaaggataaatgctagaggtgatggataccttatttaccctaatgtaattactacacattgtatgcattaatgaaaatatgccatataaggcgtaaatatatacacatactatatacccacaaatactaacaataaatttcaataggaacaaagaataaaaatttaacctatgggaaaaatattcttcaactcatttgcagtttaaagccactgacaaagtgattactagagatgttattccactatgtaccaaatagtatactgctgccatcttttacctacacccttgagtaagttgggataggttaaagttagtcacatttaaaggcttatatttaaagtcaacttaaaggcttatactttctggaagattttttcacagtaattgcacttttaatgcctttattaactatgaaccttcttatattgagtaagatgtgagtgggcattattcctgtaattccaacacactgggagatcaaggtgggaaaaatcacatgaggtcaggagtttgagaccagcctggccaacatggtgaaaccctgtatctaccaaaaatacaaaactagctgggcgtggtggtatgtgcctataatcccagctacttgggaggctgacacacaagaattgcttgaacctgggagtggatggttgcagtgagtggagattataccactgcactgcagcctgggcaacagagcaagagtgtctcaaaaataaaataaaattggccaggcatggtggctcatgtctgtaatcccagcaatttagggggctgaggtgggttgatcatttgaggtcaggagttcaagatcagcctggccaacatggtgaaaccccgtctctactaaaaatacaaaaaattagccaggcatggtggcaggcgcctgtaaccccagctactcaggagactgaggcaaaagaatcagttaaacccaggaggtggacattgcagtgagctgagattaagccactgcactctagcctgggcgacagaaaaaaactccgtctcagattaaataaataaataaataaataaataaataaataaataaataaaattgaataatattcagtaagtgaactagaaacacagacaactaccaaagatcagaaaaatgaaaataacaagaaatattaaaatagcaaaaaaacagaaattgtggatataaaaaatacaaaaaatccctgaaaaatttctttaaaaaatgatgtaaacatggaaaagttgaacaaacaaactaggatacacataaagatatttataacaagcatacatataagcaaaatttcaaaattcacagataagagaattttgggagctcaatgtaggcagatgtatgatgaagaattgttgtatgcaactgaagttaattttttaccacattcagatatgttgttggatcctttagaggttttgtgcagtcctccaaggtaccactaagaaaatatctgtatagatacacaaaagaaaatttaaaaaacctgaaagcatgtcaatacaaaaatcaaaaaaacacaaaaaagacagaaagagaaaatgagagacaaagatacaaaatctaataaaacaattaataaaataccattagtaagtttttctcttttagaaaactatttaaatatatataattatatttccaatcaagagacatactttcaataaaaaggtttattaaaaattctgtgaaatcaagattcaacttgactttctacaagagtcagttgagatctaatgacaaaaaaagactgaaagtggtgagatggaagtagaaatttaatgtaaatattaaccaaattagagcagaagagctcaaaataatattacacaagctacatcttaagtaaaaaactgtcatattttataaaatgtactttaagtcaaaacttcaaacagacaaaaaaggacatttaacaatacatagattcattccctgtgaatgtatgacaaatttgtttatacatgcatgtatttgtgtgtgtgtctcaaattaggctttcagatatataaagtaaatactaacaaaactgaataaacacagagagagcaatataattatagtaggatatttcaataccccactttctgtaataataataaaacaagatgatattagtaagggaacagaggactaaaaggcagtcaaaaacaataatttctaatgaaggtatagagaacactcctcaacaacatcgggatacacagccttctcaatagctcattcaacattcttctttataaaccacctgataggccaaaaacaaagacttaacacattttttaaaaccgaaatttcatagattaccttctacgacaaaaaatggaattagagtataaaacaataatataaataattgataaatttacagctatatagaaatgatacaacacactcttgagcatgcacttgttgaaataactgggctgggtgcggtggctcatgcctgttatcccagcattttggaaggccgagacaggtgaatttaattccatctaaaaaacaaacaattcaaaaaagaaataattaatattgtgaagatttctgtaccgctcaatttaatctacagatttaatgcaatatttttcaaatttctcattgcatttttgaagaaataaaaacagcaaatccaaaagtatatggaatctaaaaaggcaataaagtacccgacaatcatcaaaaaaaggaacaatgttggaggcattaccatttctgatttcaaaacacatcaaaaagatacagaattaaaacaatttggtatgagcataaaggtgaaaaagcagactaataaaatagaatgcagcacacatattaactttcacataattattgcagcattgttactgaaagccaataggtaaaagcaatgcaaatttctgtcaccaaatgattctgtagatataaaaatagtggaatctcgttcagttttcaaaaagcagaaaatattccaacaactattaagataaatattgatgacattgtgcaaaataaaatgagccagccacaaacagagattttataagcatttatacccttagaaagagaaaacagagtagtgtttgaaaagtgccacaaaatgggaagaattggtagttgtttaaggtgtatagagctttagctttgcaagataaaaacattctaatgatatgttacataataatgtcaatataattaatatgaacaaactgaatatttagaaatatatacttctcactctgtctcccaggctaaactgcagtggcacaatatcagttctctgcaacctccacctcccaggtttaacaaattcccctgcttcagcctcctcagatgctgggatgacaggaggatgccaccattcctggctaatttttttatgacactgcgccctgcctagaaatattttaatgtaaattttgttatgtgtttctgacacataacacataagtaaaaatcaacaataccagcctggccaacatggtgaaaccttgtctactaaaaatacaaaattagccaggcgtggtggcgcaggcctgtaatcccagctattcgggaggctgaggcaggagaatggcttgaacgcaggaggcggaagttgcagtgagctgagatcccgccgttgtgctccagcctggtcaagaagagcaaaactccctctcaaaaaaaaaaaaaacaaaaaacacctgttacaacaaacctacacaacaaatatacaagtgacacaaaactacgggaataatatttatactgaacaaactgcatatttagaaatatatactttttgctctatctcccaggcgaaactgcagtggtacgatctcggatcactgcaacttccacctcccgggtttatgcaattcccttgcctcagcctcctcagtagctgggattacaggcgcgcgccactatgcctggctagttttttgtattttagtacagacagggtttcaccgtgttggccagtatggtctccatcttctgaccttgtgatccacccgcctcggcctctgaaagtgatgggattacaggcgtaagacattgtgtccggcctggaaatattttattgtaaattttgttaggtgtttttgacacataacacataaataaaagtaaacaaaatgcctaaaagagatacggagttattattgtttttaaattatctttaaatccaaaagtgtttcttggacacaaaaataatatagattcacaaataaagagatgttgaaatcaggagaatttttatgactactcacctagacaggattaaaaaactgttacaggtcgggcatggtggctcacgcctgtaatcctagcagtttgggaggccaaggcaggcggatcacctgaggtcaggagttcaacaccagcctgacaaacatggtgaaaccctgtttctactaaaaatacaaaattagctgggtttgggggtgcatgcctgtaaccccagctactcaggagggtgaggcgagagagcgacttgagcccagaaggtgaaggctgcagtgagctgaggtcctaccattgtactccagcctgggcaacaagagcaaaactccctctcaaaaaaaaaaaaaaaaccctgttacaacaaacctacacaacaaatatacaagtgacaccgaactacagggataatatttatacaggcaaagaaacagaaataattgtattggcaatagacatggtttattcatatttaattttgctccacactgtcttaaattgtacagagttaaatattgtcatatacaattataatataaactaaaaaatcaaaacacaattaactggtgtgatgtgatgtacccaagaatacacaacacaaaaatattaaattgcaaaaaaaaattaaaacatggaatgtaaaacttattgaataccataaagtagatcaatgttttcatgaaaggaatcttagcatatagggaaaaagtaatacataggttacttgaagattaaaaaaaaaagaaaaaaaagctgagaacttcccaaattttgatgtaacaaaaaaattttctaacctgtaatactagattcaaaattatcttaatttaaaaagaagataaaaatgaagactttgctaaataaaagttgagtgttcatcaccattagcacagtcctagaagatatactacacgggcttgtgtgctctggctcacgcctgtaatcccaccactttgggaggccaaggagggtggattgcctgaggtcaggagttcaagaccagctgaacaacatggtgaaactccatctgaactaaaaatgcaaaacttagcccagcatggtggcacacacctgtattcccagctactcaggaggctgaggcaggagaattcttgaacccaggatgcagaggttgcagtaaaccaaaatcatgacatgcccctttagcctgggcgatagagaaagactccatctcaaaaaaaaaaaaaaaaaaaaaaaaataggccaggtgcaatggtgcccactgcactccaccactgcactccaacttgggcaatagagtgagactcagcctaaaaaaaaaaaaaaaaaaaaatcaaaatgattgtacataaaacctttaaagttattttatagaatataaaaaacaatatgtaaatctgcataaatcggccaggcacagtggttcatgcctataatcccagcactttgggaggccaaggtgggcggatcacaaggtcaggagttcgagaacagtctggccaacatgcagaaaccccatctttactaaaaatacaaaacttagccaggcacggtggtgcatgcctgtaatcccagctactcaggaggctgaggcaggagaatcacttaaacctgggagttggaggttgcagtaagccgagattgcatcactggactccagccttgacaatagagtgaaactccgtctcaaaaatttaaaaaactgcataaatctgttaatagatacaccatgtaaaataattttaggccaggcgcagtggctcatgcctgtaatcccagcactttgagctgccaaggtgggtggatcacctgaggtgaggagttcgagaccagcctgtccaacatggtgaaactcctctctctactaaaaaaacaaaaattaggcaggtgtggtggcaggtgcctttaatcccagctacttgggaggctgaggcaggagaatcgcttgaactcaggaggtgaaggtttcagtgagccaagattgtgccattgcacttcagcctgggggacaagagcgagaagacttcgtctcaaaaaatcaataaattaaataataattttaatatcaataacaaactggaaaatatagaggcatcatttttgtatttaactgaagttgttatgagattaaaacatatgttttaactttaagatgtatgtaatctccagatttcaagatgatgacaaagataatatttatagaaagtattcaaaataaaatacaaaataatcaaaacaagccagtatgaaattaaatgaaaatttaaaaagaaggctgggtgcagtggctcatgcctgtaattctagcaatttcggaggccgaggtggcagattacctgaggtcaggtgttcgagaccagcctggccaacatggtgaaacactgtctctactaacaatacaaaaattagccaggagtggtggcaggcatctgtaatctcagctacttgggaggctgaggcaggagaatcatttgaacctggcatgtagaagttgcagtgagtggagattgtgccattgcactccagcctggggggcaagcatgagactttgtctcaaaaaaaaaaaaggaaaacaggaaatgacaaaaatataactactacaaacacacaaaacaataacaatataactggtaattacaacttcatttttttttttttgaactggagttttgcccttgttacccaggctggagtgcaatggcatgatcttggctcacagcaacctctgcctcccgggttcaagagattcttctgccttagcctcccaaggagctgggattacaggcatgaaccaccacgaccatctaatttggtatttttagtagagactgtgtttctccatgttggtagggctggttttggactcctgacctcatgtgatctgcccatcttggcctcccaaagtgctgggattacacgcctgagccacctctcctggcccctacaacttcatttctttaagcaatcattttaaacataaattaattaaactacttaataaagtaaaatgcaatcttaggactttggaaggcaaaagtaggctggtcacttgatcccaggagtttaagaccatcgtgggcaacgtgacaaaactctatctcttcaaaaaatacaaaaaagctagctgggtgtgacgcacatacttgtaagccagctacttgagaggctgaaatgagtggatcatctgagtttggtaggttcaggcagcagtgactcatgcaaatcagcctggttgagagagttaaaccctatctcaaaaataaaggaggccaggtgcagtggctcatgcctgtaatcccagcattttgagaggctgaggtaggaatatcacacgaagtcagtagttgaagaccagcctggccatgagggtgaaaccctgtttctaccaaaaatacaaaaaattggccaggcatgctggcaggcacctgtaatcccagctacttgggaggctgaggcaggagaatcacttgaacccaggagccacaggttacagtgaactgagattgcaccattgtactccagcctggtcaacaagagtgaaactccatctcaaaataaataaacatatatataaataaataaaattatgtaaaggaaaagacatagaatgccttagtggttttttaaaaagctttctgtatggtgcctacaagagagtcattttagcattcattcaaataggatgaaagtaacggaagaaaaaaagtatattcaatgaaaatagtaaccccaattgagtgaggcggtcataattatattagatataatacgcattaagccaagtactaccatgagacaaaggttgatattatattattgtaaagtgagttgatttaccaggaatctgtaactataatatttatctatctatatgtatgtgtctatataacatcagggctccaaaatatataaagtaaatattgacaaaactgaagcaagacatacatagcaacacaataattgtagacatcaataccccattttcaataccagaaaatacagataaagaaacagaaaatgtagacaacattacagactatattaattattttgcatatagaggaataattgagaatacataatttaaaaaggaaaaaggcttatttggctcacactttggcagactgtataagaagtgtgtgccagcatctgcttctggtgaggttctcaaaaaacttacaatcatggtagaaggtaaagagtaactggacttattatatggtatgagacaaagcaattgtaaggtgaaggagccagcttcctttaatgaaccagctctcatttgaattaatagagtgcaaactttttggttaccaagaggatgtaccaagccattcatgagaaatttgccctcgtgacacaaacatgtcccaccaggtcccacattcaacattgaggatttatattgcagcatgaggtttggacaacatggacatccaaactgtattatagaccatctaggcttcacagacacacacaaaacgctccagtcaaaaccaagatgatacacaatattcttatttgcatctggtgtattctgttatgacatataccaagttttattaaatttaaaaatactgactgggtgcagtggctcttgcctataatcctaacactttgggagaccgaggttagaggatgcattggggccaaaagtttgagactagtctgggcaatatagtcagatccaaacactacaaacaagcaaataattagccagatgtggtagtgcatgtctgtagtcctagctactcagaaaactgaggtaaaaagatcacttgagcccaggaggctgaggctacagtgggccaaacttatgctactacactccatcctgtgtgatggtaaaaatcttatcttaaaacaacaacagccattattttaaaaagattaaaattttgtataagttgctggctctttaaagtttacagaggaaacagagggcagcaatgtctgaataagtctgtatttagaaaacaacttgtacacatttactcatgcaatgttcattaagcaggtactgtgtgctcaagagtatgatacagagcacagcactgggaataacattatgtaattctcataacaccctgggagcttgtactaaggttttaataaatttcagtatttatataaaaggcccagcatttttatttcttcttgcatttccctatcatcaaaattttaaaaaactatcaagaataaaagctaaatagagacagatataagagatataaaaaggtagagtttaatgtagtttagagaaaatttcattctgtctatatttacttttttgtgacttgtggagcaactactggatatgcaggaatagaaaacaagttcctaaatagaatgtttctgcaaatagtggttttcatagaaaatttaaaaactaagaccctacaatacatactttatttttctcatttatctgcttttgggtttcaggaaattgttagcaccagctctagaaaggcagcaggattcaccagctgaaactctgatctcttctaatcagttctgtgaggcaagactccagggtagggtcagaactaaataaggcctccagaaaaggtcaatctgaaagaactgggccaggaagtaaaccctatgtagaattctgttctctatgtcattgggagatttccgttttcttttttctaatcttacctaaaagaaacttaaatcccagagtctgtaattttaatcttttctagccaatgccctgtcaactttatactacatgataatatgcaatttaaacaaatcccttcagtttttctagggtaattttattagaaaataaatacatacacttaacaaggtgaaagaataaaaattatatggcccagtgcggtggctcatgcctgtaatcccagcactttgggaggctttggcaggtggatcatgaggtcaggagttcaagaccagcctgactgagatggtgaaacctcgtctctactaaaaatacaaaaattagccgggtgcggtggcaggcacctgtaatcccagttacttgagtggctgaggaaggagaattgcttgaacccgagtggcagaggttgcagtgagctgagatcacaccactaaactccagcctgtatgacaaattgagattccatctccaaaaaaaaaaaagaaagaaaagaaattaaaattataataacaattcttctgttcataaatatcccttcagctgtggacttcagaagtcacaacaatataaagaaagtggcaaataaagcccaagattttggacacatctatttgttgtaccaaccatatgatgcataattcaattatttatccagttgctagtctagactgaaagtttctggattgttggaaccatgactgcttcatgtatttttttaatggccatataaattggaagctactagtttatctgtttgggtctccagatcttctccttgtttatcatcccagtaccaggaaactagagaaactcatctgggtaccaaccaaagacatcttttatatgaggggatgaacaaacacaggatgactcatttctcttacactgagacagaagcagaagtaatcactcttgtctgctctggacatcctcaaatgcttcaaagacacctaggtgactgagagaattcccattgacctggggctgatggcccagtgataagccaggttggagagactcaggccgattctaaataaaaaatggaactgccttggtggagctcaaaaacctggatcacccgtcctgatttgctagctcttgggtaaaagaaagaacaaaaatgctctactccagtatcacattttacaggtaaatttagttgtgatcatggttctggatactttgtggcctcgatctctcatgcctaagatgcttatttacacttacagattctgccatcacattctatttcctcctggatcctctcacatcactgtagcagggcaatgaacaaaatgtgaaaaatctcaaaatgccacactcccaaatgggagcttaagatgtcaagactgacatctcacagtgcagaaaatgccttttgttagttttctgtacatctccgtccaaagtccagaccttttttgtaaattccaggcagagggcagaccttatctgcagattctaggtaggatcaacctggctctgcatcctatggtgttacagtaagtggagtacaaaggagggatcccctcatagaggctgctctagcacattctaaataagtctaaatggaaaaaaaaaaagctgatgtaacatgaatgtaagtagacagtttatttgggtcaactttagattataaactgggagcaaatattcaagttgccttaaatctacactttgattagcagcagttacaagaagatttgtaaagacaacaagagaaagagagagagtgggctgacacaaagttgtttttcagaaaattttatttatttacagaaatgactttgattattgattagaaatatatggttatggtttagggtatgggatatagggtccaaggcagcattattagtttattttatggctacttgtggcaatagtgaacagtttcaagagataaatacatagttcaaaggggggagaaagacataactgcactttcattttaatgtctgagtttgataaccaaaagaacttgcatttttcagataaacgttttttatttcccaatctcaagactgggattcaaaatttggagctgcagatttagggcctgaatgtctgaagtagcagcacgtgttacctgcaaatttgtgagcattttagcaagaggaggaagaagaaagtagagatcctcttgtctacatgtctactcaatgcacacgttactttaattggatttgtgggtcccatgatctctgaatcagtttcagatctgaagatacaagagtcagtgaaagaggtaaaatgactgattactgtattgtgaaatttatagaaatctgatctagcctctctagaagtgactgtagaggactatagataccaaataggcagagacacaattcttcctgcatatttatgggacagcatgcactgtgctgcacaactgtgagttcactagaagcctgagagggagtctcctctggagtaaattctggttggcaccttatgtgtttatattatgtctggtaattctagacagtgttttgaaacaataattaaaagaaaagttttctccatccccagaagaatgccacaatagaacagaaagaaaatggttttattacacaattaaacttgaatgtgacatgcatcatagtcaatctgcttaacagactgcaataataaaaagacggacatcataattagtccacaagtagaatttacagcaccatgtcatacatagttcattctaaattcacctggagattgaagaggtcatctgtgtatgctaattgcttatattcaatgataaataatcttttcacatcttcataacaggaggtagtttagcaccttgaagccaggtacctgatgaagctaggctttcactctgctacaaaaatggttgaatagggttctatgtttttggctatttatattttagagcagtggttctgtactccctggcactgggctacagcactcctgcttgatttcacctggttgctagtgtcctcttgacttctaccatctgtcactgaggaacagcccagagcacagctcacattttatgtgaagtctatttgccacagcagcactctagtgtcacatcagagagggaagcctgagctgcaggaggagagcctgcaggcctcctgggtagaatgacacattcacaataatggaaatgagagcagtgtttcagcccatttctacttataatggtgaccagggaaaaatactgctgattttccagcatgaatccagatagagatagctccagaagttctcactgtgacagcccagcttattccaaaatcaagggttatgaataaggcttctgaaacagagacccaaagcactggagagaaaaacagatctccgtcggagcaagatggttctgagagaaaaaagttaaaatgatcttaagaaaaatctcagactacatataacattgattatgtcagatagaaaatattcccctaaaagaaatttctctctaaacacctaaagtgtacagctactctcaacatgagaaacatgagcattatgaagaaagggggcagattttcagaagaattttataaagtttcttttctatctctgctgttctctcatctcctagccattgaatgggggttctacgttgaaatatatttgacaacttccaacaacactttctgatgaagaaatagaatctgactgtgttcatatagtggaatatgttagaacttgcaacacagctaactgaagagctattatggtttttgcatggccacatcacctaaccttatttgtcctgcaatagcagcataccaatttagtgaaataaaatatactaaaatagtgtttactcaaaattatctctattgaataaagtaacaaacatgtcacactaatatctacttactgtaacaatttggtagtaaagttcctttggatattaaatataaatatcaaagtataaataattttaatgaactagtgttaatgtagatagcatttaaaaaattaaaacttcagttaaaacattttatatttcaaaagtataaataacaatattaaaataaccatttaagtgattcattcaaagtaagtagtgcagctttgtattggtactattgtagaaaatactgtttctggcttatgcctgtaatcccagcacttaagaggctgaggagggtggatcacctgaggtcaagagttcaagatcaaggtggtgaacatggtaacaccccatttctactataaatacaaaaacttagtcatgcagggtgaggcatgcgtataattccagctacttgggaggctgaggcaggagaatcacttcaacctgggaggcagtggttgcagtgagctgagatcacaccactgcactccagcctgggcaacagagtgagactctgtctcaaaataaaagagaaaatacagtttaatgtacatgaatgcagattgtccacaaacattacacataattatgctaattgttatgaagtaataaatagaaagcaagatacaactacagactccactgtttagtttataccctgaactgtttttgcttttgcagtataagcacttcagcctgcaaatattggataattaccttggattttcaggtttctgtcaaagaaatatagtatcttttagtctttatcattctgtattgctaaatttaatcttatctttgtgctaagcttctgtgtgctcttttttttaattattattatactttaagttttaggatacatgtgcacaatgtgcaggttagttacatgtgtatacacgtgccatgctggtgtgctgcacccattaactcgtcatttagcatttggtatatctcctaatgctatccctcccccctcccccctctgtgtgctcttaaaatgagctcttatctaaacaaatctgtctactttaaaggactaaaaatgaaaaaaataaacttttcagaaccgaaaacaaagcaataaatctgaattatcagataatctgaagacagaaaaaatgacaaaagtcttatttagttgttaatatgatttacatatatttccaaaagcagagaaaaatatctatatataatctagatccctcaacaaaagagggaatagcaaaactttttttggaacttttttttttttgtttgtttgtttcgagacggagtctcgctctgtcgcccaggctggagtgcagtggcgcgatctcagctcactgccggctccgcctcccgggttcacgccattctcctgcctcagcctcccgagtagctgggactacaggcggccgccaccatgcctggctaatttttttgtacttttagtagagacggggtttcatcgtgttagccaggatggtctcgacctcctgacctcgtgatccaccctcctcggcctcccaaagtgctgggattacaggcttgagccaccgcgcccggccttttttcagaactttttaatgagtttttgaacccttggacatctgaaatttgcacactgtatgcacttgaaagaaggtttatggggaagctgggtggggtggctcatgcctgtaatcccaacactttgggagaccaaggcagtcagatcacgaggtttggtggtcgagaccatcctggctaacacggtgaaaccgcatctctactaaaaatacaaaaaattagccaggcgtggtggtgggcacctgtagtcccagatactcgggaggctgaggaaggagaatggcctgaacccgggaggcagggcttgcagtgagccgagatcgcgccactgcactccagcctggtcaaccgagcgagacactgtctcgaaaaataaaaaataaaaaataaattaaaaaaagaaggtttatggggaaaaaaaacccagaagataaaaagatattacataaaatccataaatactcaagaccaattaaacagaatagagagcccagaaataatgccaccttcctacaaccatcagattttttacaaagttgacaagaagaatgtgggaagatttttctctgtaataaatggtgctggaataatagctaacactatgtagaagacagaaacttgaccccttcgttgcaccacatacaaaaatcaactcaagataaaataaagacttaaatgaaaaacttaaaattataaagaaaccctgcaagataacctaggaaataccattcttgacacagaaacaggtaaagacttcatgatgaaactacaaaaaccaactgcaacaaaagcaaaaattgacaaatgggacctatttgaacttaagagcttcttcacaggaaaggaaactatgaatagagcaaacagacaacctacagagtaagagaaaatagttgcaaattttgcctcttacaaaggcctaatatacacaatttattaagaactgaaatgagtttagaagaaaaaaccaagaaacctcattaaaaagtaggcaaaaaatatgaacggatgcttttcaaaagacatacatgtggctaacaaacattatgaaaaaaaggtcactgctaatcattagagaaattaaaagaaaaacacaatgagaaaccacctcactcacacacgtcagaatggctatttttaaaaagtcaaaaaataacagatgctggcaaagttgcagagaaaaaggaatgcttatactctcctggtgggggtgtaaattagttcaacaacttaaaaagcagtgtggcgattcctcacagaactaaaaacagaattatcatctgatccaggagcctcaaaactgggtatatacccaaagaaatataaatgtttatattataaagacacatccacatgcatgttcactgcagcactattcacaatagcaaagacacggacaggccctgaatgcttatcagtggtagactggataaagaaaatataatatggtcagatgcggtggctcatgcctgtaatcccagcactttgggaggccacagcaggtggattgcctgagcttagaagttcgagaccaacctgggcaacatggcaaaatcctgtctccacggaaaatacaaaaagaaaaattggcaaggcatggtaacacacacgtttagtcccaaggttgaggctaaagtaagccaatatcatgccatggcactctggcctgggcaataaatgaaaccctgtctccaaaaataaaataaaataaaagatttagtaaaaacaaaatatggtacataaatatcatggaatactctgtagccattaaaaaataattatcatgtcctttgcaagaacatagatgaagctggagaccattattcttacaaaactaatgcaaagtctgggcgcggtggctcacaccggtaatcccagcactttgggaggcggaggcgggctaatcaccggaggttgggagattaagaccagactgatcaacgtggagaaaccccgtctttactaaaaatacaaaattagccaagcgtggtggtgcgtgcctgtaatctcagctacttggaaggttgaggcaggagaatcccttgatccccggaggtgaaagttgcggtgcgctgagatggcaccactgcactccagcctgagaaacaagagcaaaactctgtctcaaaaaaaccaaacaactgggccgggtgcggtggctcatgcctgtaattccagcagcttggggggccctgaggagggtggatcacgaggtcaggagatcgagaccatcctggctaacacggtgaaaccccgtctctactaaaagcacaaaaaattagccgggcgtggtggcgggcgcctgtagtcccagctactccggaggctgagggaggagaatggcgtgaacctgggaggcggagctttcagtgagcagagatcgcgccactgcactccagcctgggtgacagagcgagactcggtttcaaaaaaaaaggacaaaacagcacaacaacaacaaaaacagaaaactaatgcagaaacagaaaaccaaatgcatgctattatttttaagtaagagctaagtaataagaacacatgaacacaaaaaggagaacaatggacactgaggcctagttgagggtggagggtgggaggactcagaggatcagaaaacatacctgtttggtgctatgggtagtacctcagtgacaaaataatctgcacaccaaaccctcatgacataattttagctatataacaaacctacatgtgtacaccaaaccagaaataaaagctaaaagaaaaaaaaaaatccctgcgtgggagagtacaatgcaggtgtatgaactgattttggctacagatagtggcccaggtggaaatgtactctgattgatttcggtgtgcatgcaggcagatgagattaaacaggtggctcagaaccttagggtggtggagaaaacaggttgctgctgcagattcagtgtctgggggtggggatatgccaggagacttgtagagacttgtgggttcttggcaagaaacacctggatcaaaaatgccatggtggccaggtgccatggctcacccctgtaatcccagcactttgggaggccgagacagatggatcacctgaggtcaggagtttgaggacaggaattcaagaccagcatggtggaaggcgcctgtaaacccagttactcgggaggctgaggcaggaggatcacttgaactcaggaggcagaggttgcagtgagccaagatcgtgccactgcacaccagcctgggcaacaagagtgaaactctgtctcaaaaaaataaataaataaataaaaatacaaaaaattagccaggtgtggtggtacacacctgtagtcccagctactccggaggctggggcaggagaatcacttgaacctagtaggcagagattgtgtaatggcctaaggcgttcaccttgccctttgcctagacagagcccattcatcaatacaggagaatttgtggagaaaatattaaacgttaaatttcaactcaattgaacatggacacaaacaatggttaccaagtcctgggacaggttatgtgagccccttgaggcattcatccagcactatttttgagaaatctctgtttgaaatgcttgttccttggtgccataaagaaatagcacttgaacataaatttaatttactcagtaaggccatttttactttctgcagaaagggtacacttaccagcagttttgccatgagtgtacaccgaacaaaggagacagggtcacttataaccagatgcatcaactctactcctgtgttgttttcactggctgggactggacctcacattctgtatttgtctcgattggctagcaatgtagaactttttaaaagaggcaaacgcagaggagaacagaggaaggaggaagtaacttgtagaatgctgagaaaggtaaaaacaccttcaaataaggaagaggaacaggctatgacctaatgcttgcttggaccagtataaacatgccagagcaaatatttaggctaaacagtgggagctaagaacataaagtacattgatttctttattatggctagcagatatttaagaatattagcacaggtctttcaatacattttacttctaagagaagttactatttactcctaattagatggggaggaaagtctttgaagagaaacctctactttacttttacatctctattttaatctattcctctacgttagttattgaaaaacaatagacaattgcaaaaaaacaagttcacctatttgtgttcctggagcccattcacaaagggccctcgtgactgggcctcatgccaaacaagttgttacaaaaagagctagggccgcagactgccctagcttcaggagacctctcctcatctgtgcacggttgagtgtccgactctggagcccaggctatcacttcccggtgtggtggtgaatcctccatagtctgatgagtgtttttgtctgactctggagcccatactgttgcttcctggtctggtgaggaatcctccatagtctggtgagtgtaaacatacacacacacacacacacacacatatatacacacacatatatgtacatatacgtatatacatatatgtatatacgtatatgtatatatacatatatacgtatgtgcatatatacatatatacgtatatacgtatgtgcatatatacatatataggtatatatacatatatgtacatatacatatatacatatacatatatacatatatacatatatacataatacatatatacatatatacatatatacataatacatatatacatatatacatatacgtgtgtgtggtcatgtgtgtgtatatatgtgtgtgtgtgtgtatatatatcacttttcccttctcccctttccattgcaattttcttattatatcaatttgcttattatatctgcattgccatttacataagataaagcttctttacccttaaaggtattgtgtgtgtgtctttctttctcccctcatgagtttcctgaacagaacaccatatttttcagaggctttatttgtttcttattattcttttttccttaatcttgcctgcatgcctaattttgacaaggtgctattcaaactctgatatcctttcttctgcttggtgaattcggcttcaaatacttttgtatccttcatgaagcataaaacaaaaactaactgggcctttggccaggcatgatggctcaagcctgtaatcccagcactttgggaggtcatggtgggtggatcacgaggtcaggagtttaagaccagcctggccaagatagtgaaaccccatctctactaaaaatagaaaagttagccaggcatggtggtggaggcctgcgtcaggcctctgagcccaagctaagtcattgtatcccctgtgatttgcacgtatacatccagatggcctgaagcaagtgaagaatcacaaaagagaaaatggccggttcctgccttaactggtgacattatcttgtgaaattccttctcttcgttcagaggcttcccaactgagcaccttgttacccccgcccctgcccacaagagaaaaaccccctttgactgtaattttccactacccacccaaatcctataaaatggccccacccctatctccttttgctgactccattttcagacgcagcccacctgaacccaggtgattaaaaagctttattgctcacacaaagcctgtttggtggtctcttcacatggacgcatgtgaaagcctgtaatctcagatactcaggaggctgaggcagagaattgcttgaacctgggaggcggaggttgcagtgagccgagatcgtaccactgcactccagactgggcaaaagaatgagactctgtctcaaaaaaacaaaacaaaacaaaaacagaatacagaagatctttcttccattttgactgtagaaaatgaatgtatttccactggaaaatgtggtagataattgatgagtaacatagattcgtcaaactatccgtttctctttttgcagggtaaatttgtgacagtgactatctcggttctgtatcttgtcttgatttcttagtttaatgctaaattatatgtggtgaaacgtggtactgttagatatgagttctaaatgtcttttcaaagagtcaatatgtcagtatgttcaattctttgccttctacttataaacttaacttcctcgtaaagcaaactttttcaattacctgctccacctgactcatttcaatcacctgctccaacctgactcattcccattacctgctacctgctctgccctgactcattttttccccacataaccattttttttcccgccaaaccactcacccaatcactgtctttaaattagctaagtggaattagtttagcctatgcagtctaaccctagccaataggggaacgacacagcaacaggggccatgcgcgtcagggataagaacccctttccctcccttgtccaggtgtgcactcaccattgctccatttgtaaaggcacacccttctatagaattaccttgccttgctgagaattaaaaagaaaattttatattcgagtgctatttcttttgcggcacagaaattttatttataacaatttgggggttcgcttgtgattacattcccctccaggggtggtctctggttctctctcatgaggaggtttgccctgcccccttgtggtggcctcaggggtgagaaatccagacccactcagtgggaaaaataaccggagctctcagcaacgaggggaaaaaaaaactggccagtaacctagcttaaaggatcctcatatactgtggcaacaactctgtgcacagacccaggaaggagaagctgcgggagccagaaaagtacttcattggtggtcaaattctggagagctaaatgtgtttgtgcgtgattgatcacaaacaaccctgcttgcgatgttgttcgtgtggatggtgacaagtcctactgctgaatggagtgagtgggtcctctctgtggttccgtagctacctcatatgacttagggtggatcctgccatgagatttattctgacatgccaacactaagaggggcctaattctcccttgggggagcagccagagagaacaacacgaatgggaagtgcgcaaggaaagagggggaaagggaggaaacaggttaactttctgggacaggcaaggagagacatttctggtgtcaggggttgagacttccgggacaggcaaggtgagacagccctggtttgaggggttgaggcttctgctaatttcaagggttgaacctcacacaacccccctttccttttatcttgggggaagaaagagtagctccactcccgctggtccctcccctaggggaaggagaaggagaggacagaacagcagcataagcatctgggagaggcacggaaagaccagaagagagatgagacagagagaaagacagaggggaaagagagagaaagagaggcagagagagagagaggaagagacagagacaaagagggagtcagagagagagacagaaagtcaaagagagaaagaaagaagtagtaaagaaaaaacagtgtaccctatttctttaaaagccagggtaaatttaaagcctataattgataattgaaggtcttctccgtgactctataacactctaataccaccttgttgtcagtgtaaacaagggcgcagcccgaaagcactgaggtcactgacaacctgtagccttcctatcaaaaatccttaacccagaaacctgtggatgaaggtaattcattcaatctgtagtgacaactgctttgcccgtaatgcccaaccttgtttttactaaccctgtttttagactccccctttttctcccttaatcacctagccttgtttccacatgaataaaaccctccctgggccaggtgcggtggctcacgcctgcaatcccagcactttgggaggcctaggtgggcggatcacgaggtcaggagatcgagaccatcctggctaacatggtgaaaccccgtctctactaaaaatacaaaaaattagccaggcgtggtggtgggcacttgtagtcccagctactggggaggctgaggcaggagaatggcatgaacccgggaggtggagcttgcagtgagccgagatcacaccactgcactccagcctgggcaacagagccagactccgtctcaaacaaacaaacaaacaaaccaaaaactctcccttagctgagaaagctagacaaactccatctggcccccttgatttataagacgttaaggactccttacccacccccttcttcaaggagttaacttgtgtaaacagattctcaacatatcaaaagagtccaattaactgataaggtactgaaacaaacaatgtatgaagttcccaggatcttgctcaaaagataacaccacaaagccttgagtctgtgtccggcatagcacccatatctaacatcttatgaaggatttagagcccccgcacctgctaccgttgcttttctgtaaacatttgtcttttaaattgtctgtttctctgtaatcatttgtccttttaatttttgcatgtttttacttctgtagaattgttgcatttgagctcccctccccttcctaaaccaaagtataaaagaaaatcaagccccctcctcatggccgagagaattttgagtgttagtcatctctttggccacaggctaaataaaggactcttaattcatctcaaagtgtggcgtttttctaactcgctcgggtataacatttggaggccccagcgagatatattccccaccgggtgagagccgggctttctccaggctcccccagacagatggctggcttattggggggtgccacctgaaaaatttttccaggtccgttaaaagtgaccatcttccggaggagagcagattgactaccgtgtgtttgcccacaaaattccacctctgagtcctcaacttctgaccctggggtcaggtaagtcaggcttgactttgccctggactcagtccatatcccaggtgctgggggactgagtcctggtttctggcaggccagtctctctctctctctctctgtctttctctctctgtctcattaaagactagtctcactctctgctctctttctcactctcactctccctctccctttttctatttctcatccttctcttgttcaggtttcttggagatctccgggaaaaaaaaaacaaacaaaactgttataaactctgtgtgaatggtgagtgattgggtgattgtggaagacaagggcttgtgcttgtcttccagtttgtagctccatggcgaaagctacacagcttgagtgggccctcacctgtggttccatggtgacctcgtaaggcttaagaggcatagcttgatctgagccgggggtttataccagcctgccagtactaagaggagcccaagtcccccaagggggagtggccaggtgggcatctgaatgatcccatcatgggaccccctccccttgtctgtctaataaaaactgtcataattgtttacatgccctagggccaattttttgttttatatttattgctctgctcagtgtctattgtcttgttcagtggttgtcaaagttttgtatgtcatgtcattgatattgcccaagacatctgggtaagaacttcttcaaggtccttagtgttgattttttatcacaggaggttaaatttctcatcaatcatttaggctggccacaacagtcctgccttttctgtcagaaacaagtgaggtgttgttacggaaacgagtgtggagaacattcgcctgattgggatttctggcagcgtgaaggttgctggtatttagattgtcataccctacatccaagagctgggctgcctctaggttaaactggtggtgggttgaaaatagccaccctgcagatttccttgcttacctcttttgtcatactgtaacttttcccatgcccttaaataggacactgtgtagggaaacctacacctgtactgctttacttcatttagatccttactctgttcctctgtggctactctcccaccttaaaaatgatccgagtggcctcatccctgccccttaccctgtacatctcattttccagtgccacagcaagttcagcatctccaggacttggctctgctctcactccttaaacccttacagaaaaaggctgagtttgagctatttgcctttgagtcatggagacaccaaaagtatttagggtacaggtccagaggaagagggagaacgcctagatccaactgacccaggagacctcagggcagcctctagtccccctccctcaatcttaaagctactgtaatgtggcaagtggtattagctgttgtggtttttctgctctttctggttatgttgattctgttctttcagtactccagccccctagggagtgagtttctctgtacatgctgggtttaatatctattctcaaatcttaataaattgccttcaaaaaaaaaaaaaaaaaaagagggaaactccttctctggccttgtaagtgttggagccctctccaatgtatgccacagaatttttctctcggtttctcagaggattatggagtctgccttaaaaaaggcaagctccggacactctgtgaagtagaatggccaaagtttggagtcgggtggccccgtgtagggtcactgaaactcacaattgtccaggctgtgtggcaggttgttactgaaactcccagccaccccgatcagtttccctacattgatcaatggctgagtttggtcaggagcccccctccatgggtgcgctcatgcaccattcataattctacctccaaggtcattctgagccagaccgcattttcacctcgaccctcagccagtctgacttccctgtactgcctccctctgaagaagaggagagtctccctcacccagtcccgctgccttacaaccagcctgctcccatagaatcatcctttgtctcctcaactacttcccctgtaggctcaccgcctattgcttcttgactgtgaccacggtaggaggaagtagcccctctactaccactgagagaggcacaagtccctctgggtgatgagcgctcatctcccttcttggtttatgtccctttttctacttctgacttgtttaattggaaaacccataatcctcccttctctgaaaagccccaggttttgacctctctgatggagtccgtactccggactcaccggcccatctgggatgattgtcaaaagctccttttaacccttttcacctctgaagtgagggaaggtatctgaagagaggccaaaaagtacttcctcacatcagccaataggccagaggaggaagctagagacctccttgaggaggtctttccctctacccggcctaattgggacccaaattcctcaagtggaaggagagctttggatgatttccagtggtatatcctcgtgattattaagggagctgttcagaaacccataaacttgtctaagatgactgaagttgtccaggggcctgatgagtcaccaggagcatttttagaacgcctccaggaggcttatcagatttacaccccttttgccccggcggctcctgaaaatagccgtgctcttaatttggcatttgtggctcaggcagccccagatgttaaaagaaaactgcaaaaactggagggatttgctggaatgcatatcagtcagcttttagaaatagcccaaaaggtttttgacaactgagagtttgaaaaacaaaaacaagcaacataggcatctgaaaaaggtgctgataaagtattcaaaagacaagcaaaaatcttagtgatggctatccaagaggggaaaaagaaaaggcccccatcacagagaaatggccagggaaccttgggttcccaccataaaggtaaaggagttgaacaggctcctctaggaaaggaccaatgtgcttattgcaagcagactggcagtggaaaaaggaatgcccactacgaccagaagaaaaatcagaaaagaaaaagtcctcaccctacctgtaatggaagagcctgatgactgaaggggccagggctccctcactgttggctcccaggaacccatggtaactgctacagtggggggccagcctgtacgcttcctagtagataccagggtggagcactcggtactgtagacccccttgggcagtgtctcaaataaaagtgactgtacaagtcactggagcaactggagctattcaagaagatcctgtcacacactcatgagaagtgagcttgggacagaaaagagtgacgcagtcatttcttgtggttccagagtgtccttttcctctccttggatgagacctgctccataagttacaggcctcaatctctttctcagctcaataggctcacctcacactaggaaatacagctccctccactgcccaatttctgctaagtacccctctgtcggaggaatagcttttagtttcaccatcacaatcaccggaggagaataataatcctcttcttttggacttacagacactttttccctgagtttgggccgagccaaaccctccaggactggctaaacaccattcaccagtggttgtagaactcctggccactgtcatgccagtccaggtgaaataataccccatgagtcagggggcaagacaggggattaatccccatatttaatgactgttacaagctggcatacttacaccatgtcagtctgcttggaatgctccattattgccagtccagaaacctggaacaaatgattactggctggtacaggacttaagggaagttaacaaatggactgttactgtccatccaaccgtccctaatccttatactctacttagcctgctctcaccagaacatacagtatacactgtccttgacctaaaggatgctttttttgctattcctctggaccccaaaagccagccgatctttgcatttgaatgggcagatcctagctcagggaacactacccaactgactttgactcagttacctcagggttttaaaaactcccccaccctttttggggaggctctccagcaagatcttgtaccattccgagctagtcaccctaactgtactcttcttcagtacgttgatgatcttttattagctactggaactatggacagttgcctgcaacatatgagagacctactttacctccttcaggagctcaggtatcaagtctccaccaaaaaggcccagctctgtcttcccagagtgtcttacttgggatacgagataaaccaaggaaaaagggcactcaccagtgcccagaaagaagccatcctatgaatccccgctcccaccaccaagagacaggtacatgaattcctgggggccatgggatactgctgcctctggatattggggtccacagagattgccaagcccctgtacactgctacaggaagaaacggcccactggtttggacagacaccgaagaacaggcttttcaaaacctgaaaaaggcattaactgaagcccctgctttagccctcccaaatatctcaaagcattttcacctgtttgtccatgaaagccagggagtttctaaaggggtgcttactcagactttaggaccctggagatgcccagtggcctatttatctaagaggctggatcctgtggcctctggatggccaagttgtctgcaagccatagtggctagagcaatactagtccaagaggctgataagttaactctgggccaaaatttaacccttatggctcctcatcccatagagactttactatgaagtgctcctggcaaatggatgtcaaatgctcacatcttgcagtatcagagtttactgttagatcagccttgtttgactttctcccccacaaggtgtttaaatccagctacactactccctgatccagactccactactcctgttcatgactgtcaggatctgttggaaactaccaaaactggccaacctgatcttcaagatgtgcccctagaaaaggcagatgccactgtgttcacagatggtagcagcttcctcgagcagggagaacgaaaagctggtgcagctgttaccatggagacagacatgttgtgggcttaggctttaccagcgaacacctcagcacaaaaagctgaattgattgccctcactcaggctctccaatggggtaagaataaacgtattaacatttacactgacagcaggtatgcctttgctactgtacatgtacatggagccatctaccaggagtgcaggctactcacctcagcaggaaagactcaaaaacaaagaagaaattctagccctgcttgaagccgtatggctccctcagcaggtggctgtaatccactgcaaaggacatcaaaaagaaaacacggccattgcccgtggtaaccagagagctgattcagcagctcaggacacagcatgactttcaggcacacctctaaacttgctacccgcagtttcttttccacagccagatctgcctgacaatcccacatactcaacagaagaagaaaaactggcttcagatgttggagcaaataaaaatcaggaaggttggtggattcttcctgactctagagtcttcatatccagaactcttaggaaaagtttaatcagccacctacattctaccacccatttaggaggagcaaaactagcccagctcctctggagcctttttaagatcccccatcttcaaagcctaacagatcaaacagctttccagagcacaacctgcacccaggtaaatgccaagcaaggtcctaaacccagcccaggccaccatctctgaggaaactcaccaggaggaaaatgggaaattgactttacagaagtaaaaccacaccgggccgggtacaaatactttctagtactaatagacaccgtctctggatggactgaggcatttgctacaaaaaaagaaactgcctgcatggtagttaagtttttactcaatgaaatcatccctcgatatgggctgcctgctgcaatagggtctgataatggaccggctttcacctcatccatagctcagtcagtcagcaaggcattaaatattcaatggaagctccattgtgcctatcgaccccagagctctgggcagatagaacacatgaactgaaccctaaatacactcttacaaaattaatcttagaaacctgtgaaaattgggtaagtctccttcctttagctctacttagagtaaggtgcaccccttaccaggctgggttctcaccttttgaaatcatgtatgggagagtgccgcctatcttgcctaagctaaaggatgcccatttggcagaaatatcacaagctaatttattgcagtacttacaatctctccaacaggtacaagatatcatcttgccacttgtttgaggagctcattccaatccagttcctgaccagacggggccctgccattcgttccagccaggagacctagtgtttgttaaaaagttccagaaagaaggactcactcctgcttggaagggacctcacaccatcatcctcacgacgccaacggttctgaaggtggatggaattcctgcttggattcatcactcccacaacaaaaaggccaacagagcccaactagaaacatgggtcccgaagcctgggtcaggccccttaaaactgcgcctaagccgggtgaagccattagattaattctttttatttacctctcttgtttctttttgcctgttatgtcctctgagccttcctactcctttctcctcacctctttcacaacaggacgtgtattcgcaaacactacttggagggccggtacctccaaggaagtctcctttgcagttgatttatgtgtactgttcccagagccagctcgtacccatgaagagcaacataatttgccggtcataggagcaggaagtgtcgaccttgcagcaggatttggacactctgggagccaaactggatgtggaagctccaaaggtgcagaaaaagggctccaaaatgttgacttttacctctgtcctggaaatcaccctgacgctagctgtagagatacttaccagtttttctgccctgattggacatgtgtaactttagccacctactctgggggatcaactagatcttcaactctttccataagtcgtgttcctcatcctaaattatgtactagaaaaaattgtaatcctcttactataactgtccatgaccctaatgcagctcaatggtattatggcatgtcatggggattaagactttatatcccaggatttgatgttgggactatgttcaccatccaaaagaaaatcttggtctcatggagctcccccaagccaatcgggcctttaactgatctaggtgaccctatattccagaaacaccctgacaaagttgatttaactgttcctctgccattcttagttcctagaccccagctacaacaacaacatcttcaacccagcctaatgtctatactaggtggagtacaccatctccttaacctcacccagcctaaactagcccaagattgttggctatgtttaaaagcaaaacccccttattatgtaggattaggagtagaagccacacttaaacgtggccctctatcttgtcatacacgaccccgtgctctcacaataggagatgtgtctggaaatgcttcctgtctgattagtaccgggtataacttatctgcttctccttttcaggctacttgtaatcagtccctgcttacttccataagcacctcagtctcttaccaagcacccaacaatacctggttggcctgcacctcaggtctcactcgctgcattaatggaactgaaccaggacctctcctgtgcgtgttagttcatgtacttccccaggtatatgtgtacagtggaccagaaggacgacaactcatcgctccccctgagttacatcccaggttgcaccaagctgtcccacttctggttcccctattggctggtcttagcatagctggatcagcagccattggtacggctgccctggttcaaggagaaactggactaatatccctgtctcaacaggtggatgctgattttagtaacctccagtctgccatagatatactacattcccaggtagagtctctggctgaagtagttcttcaaaactgccgatgcttagatctgctattcctctctcaaggaggtttatgtgcagctctaggagaaagttgttgcttctatgccaatcaatctggagtcataaaaggtacagtaaaaaaagttcgagaaaatctagataggcaccaacaagaacgagaaaataacatcccctggtatcaaagcatgtttaactggaacccatggctaactactttaatcactgggttagctggacctctcctcatcctactattaagtttaatttttgggccttgtatattaaattcgtttcttaattttataaaacaacgcatagcttctgtcaaacttacgtatcttaagactcaatatgacacccttgttaataactgaggaatcaacaatttgattccccgaaaacatgggtggtgaatgtaatgcccaacattgtttttactaaccctgtttttagactctcccttttgctctcttaatcacctagccttgtttccacatgactaaaactctcgcttagctgagaaagccggacgaactccatctggcccccttgatttgtaagacattaaggactccttacccacccccttcttcaaggagttaacttgtgtaaacagattctcaacatatcaaaagagtccaattaactgataaggtactgaaacaaacaatgtacgaagttcccaggattttgctcaaaagataacaccacaaagccttgagtctgtgtccggcatagcacccatatctaacatcttatgaaggatttagagcccccgcacctgctaccgttgcttttctgtaaacatttgtcttttaaattgtctgtttctctgtaatcatttgtccttttaatttttgcatgtttttacttctgtagaattgttgcgtttgagctcccctccccttcctaaaccaaagtataaaagaaaatcaagccccctcctcatggccgagagaattttgagcgttagcggtctctttggccaccggctaaataaaggactcttaattcatcccaaagtgtggcgttttcctaccttgctcgggtataacatgctaacagaagagagtatgagattattctgttaaaaaaatgatttatcattaaccaccgtaaatccccttaacccagcaggtttcccaacagggagtctaaaccttaattaccatagaaaagtctgaccagacctaggaggaactcccttcaggacaagatgatagatggttcctcctgggtgattgagggaaaaaggcacaatgggtattcagtaactgataaggaaactcttgtagaagcagagttaggaaaattgcctaataattggtctgctcaaacgtgggagttgtttgcatccagccaagccttaaagtacttacagaatgaggaaggagtcatctataccaattccaagttaatacggactgaacaaggtcttattaatagcaaataataattgaaatcccaaattgacaaggttttcaacaaaagtaaagtttgctgaaagttaacagtgttaacatgtattatcctaacttctaatcttgtggccttaaacagtctagtccacagacaggaaggaagttcgcattggagaagaatggttatcatctttgaaagaaaaaaaagggggggaggagaatttatgtaaaaagggatgttatatggtaaattcttgttctaaaataaattaactgtttgcttaaagaaagggatgtttgcaacaagtcagaaagttgaggcatgtgaagaattatttttgaaagccttgaaaaatgttataaagggaatttatgcaggaaatgttttataatttaaaagtaattaggcgtcctgaatgtaaaactattgaagaaacaatttacttgcaaggtgtgtaaggaaagtaaaatatacttttggtaaaaggattataaggaggcataagaatgtggatttttacctacacttaaaggttaaaaaaatttattttaaaggtctcagcaagttttgaaacattaattgtaaagaaaattctgtgtgtaaacatatgagctaaagttaaaggggtatcatccagtttttctgtgaactggacattaaaataaaagcacaacaggtttttcttaacttgctctttaacaaactttaacaactaacttgctctctaacaaaaattataaaaggttaaaaagagtctataaaaatcttaccttatggtcagacattaaaagttggataaatatgtctacaaggttttattaaagttaagtttaatattaataacactaaatttagcttatctcatataaaaatcatatgggaagcattttaaaatataaaatggtgtttgactttctttggtctgaaatctaataaaaataggtactaaagaaaatttctcaacaagaacgcaccaaggactataaagtccactgttgaggtccccacatttaaaacaaaagatcgatttcttagaaatcttatactaagcgtatcttccactttactttccctcaaaactaaaagtcttttagcacaggtaccacccctagaatttctggtaaaccagcaccagccttgggatcacgttctcatcaaagggtgaaaagaaggaaaactcaagtcagcctgggaaggaccctatcttgtgctgctaactgaggctgctgttcatactgcagaagggggatgcacacatcacacctgagtcaagcaagcgccattatcatcagaatcatgggccattgttcctggatcaagccctaccaaattaaagctaagaaaagctcagtctagctatactttcctttcctttcttaacccagtgcttatattcattactattcctaccactatcaactctaaccccactttagagcacttctatgatttaggagcagaggtcactggaaaggatcctatacgattctttaagatgcgcatttttctccctcctccacctcctacatctgccctgttcccaaacctatgacaccaaactatgcctcacctcatgccaaatgacaaaagcaagctctcggtagtagaaataggagatctgaggcaaaccatagccattgaaacaggatataaagatgtaaatgcctggataaaatggattaaagattccattcacgctttaaacagaagtggctgttatgcttatgcggatggtaggccagaggcccgggctgggcctttccactggggtggtcctcaaatcaagtggacacggagtgcatgaccgctgtttttcaagattccactgcctggaataacgaatcatgccaagctttctctgctatttcctgaagtccaacaccctgtgggtcagcccctgagcgccatccagcctccatcttccaaaaccaattttacatcgtgtctccaatgacaagggaaaaaatttggcattccgtggaaactttacaggatgcagtgaagtccggcatttcctagagctgacccattagtctgctcttattcatccctgagtggatgtatggtagtattatggaggacctttactggacactctgccagataattaagagcagtacttatgctctagttcaattggctatcccttttactctggcatttcctcaaccagaggaaggaaaaataagatatcataaagtgagagaagctccttatgggtcttttgactctcaagtctatttaaacgcaattggagtcccacgggaagtaccagatcaatttaaagcccaaaatcaggccgggcacggtggctcacgcctgtaatcccagcactttgggaggccgaggcaggcggatcacgaggtcaggagatcgagaccatcctggctaacacggtgaaaccccgtctctactaaaaatacaaaaaattagctgggcgttgtcgtcggcgcctgtagtcccagctactggggaggctgaggcaggaaaatggcatgaacccaggaggtggagctttcagtgagccgagatcgtgccactgcactccagcctgggcaacagagcgagactccatcttgaaaaaaaaaaaaaaagcccaaaatcaaatagctgcaagatttgagtcaatattttggtgggtggcaattaataaatgtagattggataaactacatctattacaaccaacagcgatttattaactgcactagaaatgctgttaaaggaatagctgagcaattagggcctattagccagacggcttgggaaaaatagaatagccttagacataatattaacatacagagaaggagtttgcatcatgattaaaactcaatgttgtaccttcatcccagacaacactgcccctgatggaaatacaacaaaggcattgcaaggtctgactgctctgtccaatgagttagccaacaattcaagtgtaaatgacccctttacaagatggctagaaaagtggttcagtaaatggaaaaaaataatagcctaaattcttacttcccttgcagacgtaatgggtatacttcatcttgtcaggtgctgtgtcacaccatgactccgtgagttggtgcagaggcttataaaaacagcacttactaaaacctcccttaattatccaccaccttatccatagaagcttcttttggaaaatcaagcagaacaactaagccaagacatgttaaaaaaaatttgaaaagaaagggctgtaaggaaatgcaagaggaggggttgttagatatgacttctaaatttcttctcaaagaatcaatatgtcagtatgttcaattctttgccttctacttttaagcttaacttcctcataaagcaacctttttcaattacctgctccaccctgactcattcccattacctgctacctgctctgctctgactcattctccacccggcataaccactttttcctaccaaaccacttaccccgtcactctctttaaattagccaatcggaatgagtttagcctgtctggtctaaccctagccaataggggaaagacacagcagcagggtccacgtgcatcaaagataagaacccctttacctcccttgtccgggtatgcgctcaccattgctccatctgtaagggtgcacccttctatagaagtacctcggcttgctgagaattaaaaagaaaatgttatatttgagtgctatttctttagccgcaccgaaactttataacagtaccttctacacgtgttcccatgtgactaatcttttactgcataatttttaatagaaataataaaataatacatatattgtctgaaaaaagtagatatatttgcttttcttatggaggtgtaaaatgcaagcaacttagccaggtactgtggctcatgcctgtaatcccagcagtctgggaggccaatgcaggttgatcacttgaggtcaggagttcaagactattaggcctctgagcccaagctaagccgtcatatcccctgtgtcccacacatatacatccagatggcctgaagcaagtgaagaatcacaaaagaagtgaaaacagccagttcctgccttaactgatgacattccaccaatttgtgacctggaggggcattctcagtacacttttgagtagaaatgttcaggaagcaggatagtagcctgctgggaacattagtaagaggggctgcaaagaagataatcaaaatattgaataaggtggggtcaggagtttgagaccagtctggtcaacaaggtgaaacactgtgtctactaaaaatacaaaaattagctggtggtcatggtgggtgcctgcaatcccagattctcaggaggctgaggtgggagaactgcttgaacctgagaggcggagattgcagtgagccgagatggcaccactgcactgcagagatggcaccactgcactgcagcctgggcgacagagtgagactccatctcaaaaataataataatttattttggccactgaagacaaactcagctgattgttttaatgagaataaggagaaaatatgcagagtgtgtatctggcattgtgataagtaagaaaagagagcattatctaagtcgtaatgggaagagtgtttctttccacaaactgttactggagcacacaaaggatgtagaattttattaatcgcaaatattttttatgattttgtgtttcatctttccccatctcttttctttgttctatgcatttcttccatttggcttttcctgggctgcattttatatatatgaaaccggtaaacgtaactacagtgttttgctgagttctgtgagtagctctacccaattattcaacttcagggaggttatgggagtccccagtttttaagcagcagctcagaagcatagatgggcccatggggtttgtgactggcatctgcagtgaggacaatgttgtggaactgagccctgaatcagggtctgtgctgactctgggtggtgtcagatttcaaatgttagacaatgagttggtgttggagaattatttgatgttcagcaaactacagatttggtgccagaaaaaagatatcatggagccctggcctggaataaaattctgggtgtttgggaatgggactgaaaacttagaggaaaggagcgctgatgacagacccccttttcttgcagctgttaccacaggattcccacccactcacaaacacacacactagacattgacatgtccacactcctcccaggactaggcaccaccctcaggaacttcaccacggcatttttgatccaagagtttcttgccaagaacccacaagtctctacaaatctggcatatccccctccctggacaccgaatctgcagcagcaacctgttttctccaccaacctagggttctggacctgcttttcacaatctcgtctgcctgcattcacacagaaataaatcagagtacagccccactgggccactatctgtagcgaaaatcagtccacttacctacattgcaatctccccgacccaggaattttttttcttttagctcttatttttggtttggggtacacatgtgggtttgttacacagctatgtcatggggtttggtgtgcagattattttgtccctgagttactacctgtagcaccaaacaggtatgttttctgatcctctgagtcgtcccatactccaccctcaactaggcctcagtgtctgtttctctctctctcttttttttatttttatttttgagaccgagtctcgtactctttcccaggctggagtgcagtggtgccatttcagctcactgcaagctctgcctcctgggttcacaccattatcctgctgcctcagcctcctgagtagctgggactacaggcgccctccaccatgcctggctaattttttgtatttttaatacagacaggatttcactgcgttagccaggatggtctctatctcttgaccttgtgatctgcccgccttggcctcccaaagtgctgggattacagacatgagccactgtgtctggcctgttctcctctttgtgttcatgtgttcttattatttagctcttacttataaataataacatgcatttggctttctgtttctgcattagttttcttttttttgttttgttttgtttttttgagaaggagttttgatcttgttgtttaagctggagtgcaatggtatgatctcgactcactgcaaacttcgtttcctgggttccaacaattctcctgcctcagcctcctgagtagctgaaattacaggagggcgccaccactcctagctaattttgtatttttagtagagacacagtttctctatgtcggtcgggctaatctcaaactcctgacctcaggtgatccgcccaaatcgacctcttgaagtgctgggattatgggcctgagccatcgcctggcctctgcgttagttttctaagaatgttggtctccaccttcatcaatgttattgcaaaggacatggtcattttttgtgtgtgtgtgtggccacccagtattccatgatgtttcgtttttactaaattttgtttagtaaatttttgtttttactaaattttttattttatttttggagacaagcttattgcccaggctagagtgccaaggcatgatattggcttactttagcctcaacttcccaggctcaagcaattctctcctacctcatcctcccaagaagctaggactacacacaggcattaccaagcctggccaatttttctttttgcactttccgtggagacaggattttgccatgtttcccaggctggtctcaaacttctaagctcaggcaattcacttgcctccgcctcccaaagtgctgggattacaggcataagccaccgcatatgaccataccatattaccatattttctttattcagtctaccatcgataggcatttagggcctgtccttatctttgctagtgtgaatagtgctgcagtgaacatacatgtggatgtgtctttataatataataatttatatttctttgggtatatacccaatgatgagatccctgggtcaaatgataattctgcttttagttctgtgaggaatcaacacactgctttttacagttgttaaactatttacactcccaccagcagagtataagcattcttttttcgctgcaacctttgtcggcatttgttatttttttgaaattttataaatagccattctgttggatgcgatgtggtatctcattgtggtttttcttttaatttctctaatgattagcgatgagcatttttttcacacgattgttagccacatgtttgtcatcttttgaaaagaatctcttcaagttttgtgatgttactttttaatgaggttttttttttttttttgtaaacttgtttaagttcttggtttttttttttttttttttttttgtcttttgtttttgagatggagtttcactcttgttgcccaggctggtgtgcaatggcccaatcttggctcaccgcaacctccacctcctgggttcaagagattctcctgcctcagcctcccaagtaggtgggattacaggcatgcagcaccacgccctgctaattttgtatttttagtagagatggggtttctccatgttggtcaggctggtctcaaactcccggcctcaggtgatctgcccacctcagcctcccaaaatgctgggattacaggggtgagccactgcacctggcctaagttcttaataaattctggatattagacctttgttagagaaaaagtttgcaaattatttttattctgtaggttgtctctttactctgttgatagtttcctttgctgtgaagaagctctttagtttaaataggtcccatttgtcaatttttgcttttgtggcaattgctttttgtagattcatcatgaaggctttgtgagtttctatgtctagaatggtattacctaggttatcttgcagggtttcttataattctaagttttacatttaagtgtttaattcatcttgaattcatttttgtacatggtgtaatgaaggggtccaatttcagtcttctacatagtgctaggtaattattccagcaccatttatgaaatagagaattgttcccacattcctcttgtcagctttggcaaaaatctgttggttgtaagagggtggcattatttctgggctctctattctgttgccttggccttgtgcacttatggatttttttataacatctttctgtcttctgtttttttcccccataaaccttctttcaagtgcatatagtgtgcaaatttcagatgtcccagagttcaaaaaatttttaaagttcaaaaaaaattttgctttttctcttttcttaggtatttagattatatgtagatgtttttctctgcttttttgaaatatatgtaaatcatattaacagctaaataaaccttttgtcattttttctcactccagattttctttatctagtacttcagatttattgctttatttttggttctgagggtttatttttttcatttttagtcctctaaagtagacacagatttgtttagataaaagcgcttttcaagagcgcacagaagcttagcacaaagataggattaagttttgtaatacagaatgataaagactgaaagatgctaagtttctttgacagagacctgatgatccaaggaaattatctaatatttgcaggctgaagtacttatactgcaaaagcaagaacagttcagtgtataaactgaagagtggagtctgtagttgtaccttgctttctatttattacttcagaacaattagcatagttatgtgtagtgtttgtagacaagctgcatccatataaattaaacagtattttctttttttaaattatactttaagttctagggtacatgtgcacaacgtgcacgtttgttacatacgtatatatgtgccatgttggtgagctgcacctattaactcgtcatttacattaggtatatctcctaatgctttccctcccccctccccccaagtattttctttttttgagacagagtctcactctgtttcccaggctggagtgcagtggcattatctcagctcactgcaaccgctgtctcccgggttcaagcgattctcctgttttagcctcctgggtagctgggattacaggcgcgcatgaccacgtgtggctatgtttttgtatttttagtagagacggggtctcaccacgttggccagcttgatcttgaactcctgacctcaggtaatccatccaactcactcttccaaaatgctgggattataggtgtgagccataaacagtattttctaaaattgtatgaatgtaaagctgcaatgctgacttcgaatgaatcactttaattgttagtttaatattgttatttatacttttgaaatataaagtgttttaattgaagtatagttgctatttagttatttagagacagagtctcactctttcacccaggctggagtgcactggcttgatctcagctcactgcaatctctgcctcctgggttcaagcaattcttctgtctcagcctcctgggtagctgggatgacaggcacactccacgatgcctgatttttttttttttttgtatttttagtagagatggtgattcaccatattggccaggctggtcttgaactcctgacctcgtgatctgcatgcttcagcctcacaaagtgctgggattacaggcgtgagacaccactcctggctatagttgcaatttaaaaaatgctgcatacattaagactagtttattaaaattattcatacttagatatttatatgtaatatctaaagaaaatttactaccaagttgttacagtagatattaggcttacatgtttattactttattctatagggataattatgagtaaacacaattttagtatattttatttcactaaattggtatgctgctattacaggacaatgaagacaggtgatgtggccacccaaaattcgtaatagctcttcagttacctatgttgcaagttctaatgtgttccactatatgaacacagtcagattctatttcttcatcaaaaagtattgttggaagttgtcagatgtatttcaatatagaacctccattcaatggctaggagaggagagagcagcagagatggaacaaaaacttgataaaattcatctgaaattctgccccctttcttcataatgctcatgtttctcatgctgagagtaattgtgcactttcggtggttagagagaaattgcttttaggggactattttctggctgacttgatcaatcttacatctaatctgaactttttcttaagatctttttaactttttttcctcaaaataatcttgctcagatcaagatctgtttttctctccaatgcttttgtgtttgtttcaaaagccctattcatatctcatggtgtctgaatgaggggagcttctctatatggactctatatagagtccatctctatatggactcatttggaaattcagcagtattttttccacatcaccattataaatagaaatggaggctgaaacactgctcacattcccatgattgtgaaggtgcaattctacccaggaggcctgcgtgctctcctcctgcagctcaggccttgttctctgatgtgacactagagtgctgctgtggtgaatggtgttcatataaattgtgagctgtgctctgggttgtgcctcagtggcagatggtagaggtcaagagaggacactagcaaccaggagaaagcatccagtgccaaggagtacagagccacttcttttaaatgggaaaagtttatttgtattgaatataaggaattagcatacagagatggcctctttagtctacttgtgaagtaattatggtgactatctttctgttgttgcagcctcttaagcagattgatgatgatgcatgtcacattcaagttcacttgtgtaataaaactgttttctttctgttctattactgtagagtttctctagggcttgagaaaatttttctttttctttctttctttttttttttgagacggagtctcactctgtcacccaggctgttagtgcagtggcatgatctcggctcactgcaacccctgccctctgagttcaagtaattctcctgcctctgtctccctagtagctaagattactgtcgcctgccaccgcgcctggctaattttttgtatttttagtacagacggagtttcactacattggccaggctgctcttgaactcctgacctcgtgatccacctgcctcagcctcccaaagtgctgggattacaggcatgagcaaccgcacctggccaaaaatttttcttttaattattgtttccaaacactgtctagaattaccagacatgatataaatgcataaggtgccaaccaggattttctctagagaagactttttctctcaggcttccagtcaactcacacgtgtgttgcaaagtgcatgctgtcccctaaatatgcaggcagaattgtgtctctgcctatttggaatctatagtcctctacagtcacttccagagaggctagaccacatttctacaaacttcacaggggagcaattaaccattttacctctttcaatgactcgtgtatcttcagacgtgacactgatatagaaactatatagaccagaaacccaatcagaataacatgtgtgcactgtgtagacatagagacgtgagaatctccgtgttccccttcctcctcttgctaaagtgctcacaaatgtgcaggtaacacctgctgctactccagccattcaggcctaaatctgtagctccacattttgaatccaggtcgtgagatttgggaaataaaaaacttttatctaaaaaattcaagtccttttggttaccaaactcagagagacattaaaataaaagtgcagttatttctcccctctttgaactatgtattcatctcttgaaactgttcactattggcacaagtacctataagttaaactaataatgccacattggacagtatatcccataccctaaaccataacgatatatatctaatcaataatcaatgccatatctgtatataaataaaaatttccaacaaacaactttgtatcagcccactctctgtccttctcttgttgtctttacaaatcctcttgtaactgctgtgaatcaaagtgtagattccaggcaaattgaacctttgctcccaggttataatccttaaacttgacccaaataaactgtctacttatattcatgttgtgtcagcttttttttttttatgtagacttatcatttagaatgtgctagagcagcctctatgaggggatccctcctttgtactccatttgctgtaacaccaaacgatgcagaaccaggtggattctacctagaatctgctgataaattcaggcctctgcctgggatttataaaaatggccagatattggattgagaatgtacagaaaacaaacaagaaattttcagcattttgagatatcaacataaacatcttacagcccccatttgggagtgtggcattttgaggtttttttacatcttgttcattgacctgctgcggttatgtgagaggctccaggaggaaatagcatctgatgccagaatctgtaagtgtaaataagcatcttaggagtgagagatgaagtccacaaaatatccagagccatgaccacaactatatttacctgtaaaatgtgatactagagtgtagaatattttagttttttctcttacccaagagctagcaaatcagaatagtgatccaggttctggagctccaccagggtaattccctattccatttacattcagcctgagtctctccagcctggcttatcattgaccatcagccctgcatcactgggaattctctcacaatcacctaggtgtctttgaggcatttgaggatgtccagagcagaattatgtcaggctgacaagaacggttaattcggcttctgtctcagtgtaagagaaatgagtcattctgtgtttgttcatcccctcatagaagaagtgccattggttggtacccagatgagagtttatccagtttcctggtacttggatgataaacaaggaggagatctggagacctaaatagataaactagttgtttccatttcatatggccattaaaaaaaatgaaacagtcatggttcctacaatccagaaacgtttagtctagactagcaactggataaataattaagttatgcattatatggttggtacaataagcagatgtgtccaaaatcttgggctttatttaggccgctgtctttatattgttgtgacttctgatgtctacacctgaatgatatttatgaacagaagaattgctataatttctttttttatttttgaaatggagtcttactctgtcaccaaggctggagtgcagtggcacaatcttggctcattgcaacctctgccacccgggttcaagcaattctcctgcctcagcctcttgagtagctaggattacaggtgcctgacaccgcacctggctaatttttgtatttttagtaaagacggggtttgaccatcttagtcaggctggcctggaactcctgacctcgtgatccagccaacttggtcacccaaagtgctgggattacgggcatgagccaccatgcccagccatataatatctaattttttttaccttgttaagtgcatggtatttattttccaataaaattacactagaaaacctgaagggatttgtttaagttgcatattagtatatggtataaagttgacagggcagttgctagaaaagattaaaattagagaaattctaggatttaagtttctttcatgtaagcttagaaaaaacaaaactggtattaccccagtggcatagagaacagaattctatagggtccttaccctgttccagacctgttcatattcacacttgttggaggccttatttagatctgaatctaacctggagtcttgctctcagaactgattagtagagatcagagttttggctggtgaatcctgctgcctttctagagctggtgctcacaatttcctgaaacccaaaagcagataaatgggaaaaatgaagtatgtattgtagggtcttagtttttaaattttctgttaaaaccagtgcttgcagagacattctatttagcaacttgttttctattcctgcagatccagtagttgctccacaagtcacaaaaaagtaaatataaacagaatacaattttctctaaactacattaaactcttcctttctatgtctctttcatctgtctatatttagcttttattctttacagtttttttaaaaatttgctaacagagaaacagaagaagaaataaaaatgctgggccctttatctaaatcttggaaattattaaacccttagtaccagctccagggtgttatgacaattaaatcacataatgtgttacgcccagcacagtgctccatatcatactcttgagcacatagtacgtgcttaataaacattgcattagtacatgtgtacatgttttttaaatccagacttattcagacattgctgccttttgtttcctctgtaaactttaaagagccatcaaagaataggaaactttaggatggagatgggttgtccttatttgtacaagaaatatttggttgtgacaagagttctaagtgtaaggaaccctgtgctgtgcctgctttctctaactaatgctaataatgagcccagtggaagaaacatcagcattgacagggaacttgtttaaaacacccattcatggacccttttcaaacctgcagaatcacattacataaagtggggccaaaattaccaagtgatttataagctcgttaaagcttgagaggcaatgattagctcagtggttatcagcccaggcttctcattaggatcacatggccaatttgcagaaacctcttgtgccctccccacagcttctgtttattgttgtgggtagaaatatccatgttgtttttttttgcctttttttttttcctttttgtggagaacggggtcttgctatattgcccaggaaggtctcaaactcctgggctcaagctatcatcctgcctctgcctccctgagtgctgggactacaggtgtaagccactgcatctggctccatgttactttaatgaagggcctcatgtgactctaaggtgaggtcagaatcaagtatgagggtttcaaaatacattcatgagagttaagttccaactatgccctaaagtgcggtcacaggggcagttctgtttgggtttggtagggacaggtcagtgtggcacatatttgcattactgtagcagaaattgctggtgtctgtggcaggggagggcaactgaggacagaaaaggagaaacttatatttttatcttcatggagcggctcattgttcctgaatctcttctgttttaaaggacagaaatgagtggactttttctgtctttttctgccagttgatgtcatgctagcaggtacatgtgtggtactgacacctttaaaggcatattctcaacatgcaggtgtaatttatccagagaatctcatctgagaagaaattccagagaaggagaagaaagaaaaaaaatggcttttcttcaggtaaacaggtgtcagatgaagagctgtgtccactctgcctcctggactgccatgaatttagtacttacaaaactttatttctctacttgtgtttttcctccttaatgagtttgatttaactacttcttaaaattcttatgatagtcaagagtctctgagaaatatttctttccaatatccagtagccttctctacattttctatgttatagcttcttatatgacatgaagaattctcagcaagaatttatgatacacagtattaaaaatgttccctttgtggctgttgaacagggaaagatgtgggtactcaagatctctattggggaaacttgtggtccatagtacacatggagaacatgtcatgttgaggctccatctgtgtgttccattagctctatgcagaacaggattaagaaaatgctgatttaaatgaaatggaatttattaaccagaaagttctgaaaaaagttatttggagatatctgttttctaggttgccaaatgaagcctatttaaaattactattaaaattacacaacataggagttatctggattttgaagtttgtatacaactgattttttttatggttaaattcagactataatttacttcttttgggagaaatatttcaacactgatgctgtgttcttctatgtgaattagcacatcataaaaatttgtcctagtgcagttagtggttaaagattcacttggtggaatagctctctgatgaattattttcactacagagttaattatttttctcttcatcatgaagtatctttatgcagcggatgtgcatagaccatcacatttaatctggcagctgttcttttttctaattttttctacataattttctttggaaaatgaaggctttcatctttgcttacaggctagaaaaactgggaaaaacatgggctcttccacttactggatgtctgccaaaatatccttcttgggccaaaaacattggcattactggtgagcttgttagaaattcaaaaaatcggccaagtgctgttgctcaagcatgcaatcttaccacgttgggaggccgaggtgggtggatcacctgatgtcaggattttgagtccagtctggccaacatagagaaaaccctatgtctactaaaagtacaaaattatctgggtgtggtggtgcatgactgtaatcccagctactcaggaggctgaggccggagaatcacttgaacccgggagacttaggttgcagtgagccaagattgcatcactgaacttcagcctgggcaactagatcgaaaccctgtctcagaacaaaacaaaacaaaacaaaaaatttgagaggtgccttctaactcaacatgtcttttccatttgaaaaatattcacaactcattctgtatgatgtaaatatagcactcaaaaatgtacatgtttatgtttatggccttaattttatactttattatatggaaaaatataagaactgatattgtggatgttatgctgctcttttttctcagagttagaggatatatcagagaatatttctgtgttgatattattttattggataactttagtcagtcgaataagtcagaaccagttctctttactctctcatttcaccttaagtcaaataaaaaattctgcctatggccacatggtgaaaatgtgtgtgtgtgtgtttttcagggaccattgcaatttagagatgtggccatagaattctctctggaagagtggcattgcctatacactgcacagtgaaattgatatagggatgtgatgttatggaactacagacacctggtcttttttggtgaagatagcattaatatataattcataatatactctgaagagtatattatttctcttttttatagaatgtattatagtagtttattctttgcataaaagagtttcagcgctgggcatgatggctcatgtctgtaatcccaacactttgggaggctgaggcaggtggatcacgaggtcaggagttcaagaccagcctggacaagatgctgaaaccccatctctactaaaaatacaaaaaattagccaggcatggtggtgggcacctgtattcctagctactcagtaggctgagggagagaattgcttgaacccgagaggcagaggttgcagtgagccgagatcgggccactgcacttcagtctgagcaacagagtgagacttcatctcaaaaaaaaaaaaaaaaaaaaaaagagtttctgatccccctttatttgtaaaatcttcagaatttggtaatataggaaagaatttcttcaatatgttttatcttaatccaaactttccacagtactgagatgagctgtattcttcactctaaattagtggtacttccagaaatttagcggcataaaatattgttgccccacctgaaaatctaattgccaccaccaatttttgattcagtagtaccaggtattaaaattaagaaacctacaaattgaaagtattttctaaatatttagaaatttcttttataatttagtattttggtatcaatttactattatattttatcacatcctctctgctgagcacattactagcttgtagttggagaatatgagcaagattcatgttatttattcttaataaaacaggtattgttttctctaagccagacctgatcacttgtccggagcaaggaaaaaaacctttgactttgaagagacttgagatgattgccatagccccaggtaggtgcgagtgaaaatgaatacaacagatgacacagataagaggtcccaaggtcaaagagaaagccagtccttagaatgtgactggggaagctgagttccaaaggaaatagttcctgggcatctggggttttttgtttgttttatttttttaaattttgctctcagaaaggggcatcttttttgttacgctttttgcttttttttttttttgagatggtgtttcgctctcgttgcccaggctggagtgcaatggtgtgatctttgctcaccacagtctccacctcccaggttcaagtgattctcctgactcggtttttctagtagctgggattacaggcatgcaccaccatgcccggctaatgctatatttttagtagagatggggtttctccatgttggtcgggctgttctcgaacttccaaactcaggtgatttacccacctcagcctcccaaagtactgaaataacaggcgtgagccaccacacccagccctgctttatgcctgtaaattctctaaggattctatttttctttcagtgagcttccttcaggtttatactgaaagcaaaattcctcttcatggcatataagagactgcacaatctggctgcttttttattgtttgcaggactcacaaatatttgcatgattttgagaaactaaaactcttttttaggttttttttgcatcagatttgaaatgtgtgagagcagtagtttcttttgcatttttttgttcatttttctgcacagtcctttctgtttttattgctagtcttgaaatatagttggcaattataagtatgatatccttctgctttgctctttttccttgattgctttggctattccaagtttattttagtttcatgtaaattttagaattatattttccattactgtgaaaaaaatagcactgcaattttgattggcattatattgaatctatagatcactttggataatatggcactttagtaatatttattttcaattcatagacataaaatattttaaaatttatttggatcttccctaatttttttcatttttttattgtaaagatttttttacctccttggttaaattttttctcagacatttattatttaatactatagcaaataagatttctttcttttttttttcttttagagatagagtcttgcactgtcacccaggctggagtgcagtggcatgatcttggcttactgcaaactccgcctcctgcgttcaagcaattctcttgcctcagcctcccaactagaagagattgcaggtgcccaccatcaggcccagctaatttttatatttttagtacagatagactttcaccacgttggccaggctggtcttaaactcctgaactcagatgatcgacccccctcagcctcccaaagtgctgggatggcagacgtgagctaccatgcccagcatcttcctgtattttatcagatagttttaagtgtatgaaatcatacgtatacttgtatgttaattttatattttgctaatttactgagtgtatttggtttagacaggttttaatatactgtttatggtttctttgtgtttatttttgaggcagaatctcactttgtcgcccaggctggggttcagtggcacaatctcaactcacttcaagctccacctcccaggttcacaccattctcctgcctcagcctcctgggtagctgggactataggcacctgctgctgtgcccggctaattttttgtaattttttttttttttgtagagatggggtttcactgtgttagccaggatggtctcgatctcctgacctcgtgatccacccgcctcggcctcccaaagtgctgggattacaggcgtgagccaccgcgctcggccctgtttatggtttcttaaatataaaattttatgatctacaaactgcaactttttacttttctttaatttcaatggattaaattttttcaactaattcttctgccacatacatccagtgctagattaaaatagaagcaatgacaatgggcaaaatatagttttatattggtgtctgaatttgatggagcaaacacctcttcaaattttcataaactgatttcagaagataaaaatcttttgttggacccttagggtgatgataagctctctgaatttgtagtgaagaggggttgcagcttggtcacaaggctgctgggtctgctttagggtccaccattagttggcttgttacaggggcttggatagttgtaattcccattttatttgtgaacagaccacatgtttttcaggactttgctccatagggcagacactagggcaggtttttgcagtcggatctgcatatggtgggcctcgtatcaggatgcggatgagtgtagctttcactgagtaccagagaacatttcctcaggtaactgtgtgggtttctatgtaggcagaactgatcataaactgaggctcaggtaactgaaactgagtcattgaactgcttcacagaccccagtaaaggccaaggtttgcaggcctgcctacatggctgtaaatgggtgccttcctccaggtctctggaatggcaggaccttggccagactgtggctggtaggagtttgggataattacagagtaagttcagaattctcagtgggatcaagttgggtgaaccctatcctggtctgtagccaagaacaggggtcatgtagttttccacctgaatgagggcctgccttccgaatagaacacttctcaaccttaagctttaacagtttttcacaactccctccctggatctcaaatctctcatagaggcccttattttggagatgacgtcttgcttcataaccaaggctggtctcgaaatcctggcctgaagcagttctccaaccttaatgtaccatgtagctgtcattacaggtgtgagccataatgactggttctctaataaaggcactttttttttcctctgagatggagtctcactctgtcattcaggctggagtgcagtggcgccatctcaactctctgcaaactccgcctcccgggttcaggcaattctcctgcctcagcctcctgagtagctaggattacaggtgtgtgccaccacaaccgcctaattgttttgtatttttagtagagataaggtttcaccatgtttgccaggctggtcttgaattcctgacctcgtgatctgcctgcctcagcctcccaaagtgctgggattaaaggcatcagccacagcactcagtcaataaaggcatcagggatggctgattttttttgctgtaagggaatatgaaaatagggctcttttaaccttattgatgtcactctccctatacatttttactttctattttctatttcaaattgtctgtaactttagattcagatatttaggacaatatgctagaatttgcatggtatgcctgaagtaaattacataactagcaggcactccatatttaccaaaatacttcgttataaattcaaatttgttgcaggcaaaaaggaattacagaattttcatttacattcttcagactatatctaaagaataacagtttatttcctaatatttgtttcacatatcacagtgcctaaccctattctgccaaatatatatgtatataattctttctatgtttaacaatttaagtctattttttgcttctaaagttggattacaacagtttcattttgtgtaataatagcatatattttaaacataaagagtaaccctagtttcttttaaatgcttattaaatgtttctcattaagtcttctatttattgttttgggaaaaaaagtctttctgctacttttgttatccacataaaaaaacatatcctctacaaataataattaacaaatgtccagttttattcattacaaatattaacatcatttttcttttatttatcctttatgcatcattttatacattcacacacacaaagaacattaaaaatatatccaattattcaattttggttgaattttcattaaaataagtgttaaaaatatttatttgttttctgttttgagaaggcttttattgttgtactccagagtgttatttctggagacaaagttgcctgtgctttaatagggagattcctgggagaatctaaaccataagcaacaaaattttaagttaataaattcaagacaaagcagaaagtatagatttgctttcagcattcccgaggtgtttagatttttattagtcacctaattaaaatattgttccaataattgttcttttcttctgaaaataagcagaaactcatacttacacaaaaacacttcataattttcttacacctaaggtttatcttcagaatgatatgtgtatatttaaccctgtgcaaattaacactaaaagtctatgtttgcaggcagagaccacatgttcaaagaaaactatataacaaatatttttaaataatttttcaggattttctatggatttctatttcttttttttctgagatcgagtctcactgtcacccaggctggagcacagctgcaggatctcagctcactgcaacctccacctcctgggttcaagttattctcctgcctcagcctccatgtgccaccatgtctggctatattttgtatttttagtagagacgaggtttcaccacattggccaggctggtcttgaactcctgacctcagggaaaccacctgtcttggcctcccaaagtagtgggattacaggcatgagccactgggctgggccatattctatttctgtataatttttattatgaccataaaaataacaatgtagttaataacaatttaattgtacattttaaaataattaaagtatataattacactgtttgtaataaaaagtataaatgttagaggtgatggataccttatttaccctaatgtaattactacacattgtaggcctgaatgaaaatatgccatataaggcataaatatatacacatactatatacccacaaataccaataataaatttcaataagaaaaaagaataaaaatctaacctatggaaacaatattcttaaattcatttgctgtttaaagccactcgcaaagtgattactagagatgttatttcactatgtaccaaatagtatgttgctaccatcttttacctacacccttgagtaaggtgggataggttaaagttagtggaataatgcttcattaaatgcacaatagtcttaacatgttaaaaaaataaaattaagtttgcacataatctaatgatttttaaatatactgcattttattacataaaagtacaattaataatatacttattttaatatacttttaactataattaacaattccaccataatgtagaaaatagtctgaacacctagcttatacattacttaatataggttaactacaatgagcctctccacttatcttttcatcatgcatcttacattttagtgtccttacttttatagaaaaggttataaataatgcccaataaaaaaagaatctctggtatctctgatgcagcaaaaattgctcatatgttttcacatgtgaataggaataaaataacagcataaagtaatttgaaagctgtatgacatcattattcacttttgaaaaactttttttcaagaaaacaagtatacttttaatgtaattacaatgcttccaaaaatctccttttaaagctatatacaaataattttaaacaattttttatttttatatttatcaagtgtggcaaccaaataaaggctttgtcacattttatacttttctacagtttcacactagtataatttttttatgtatagaaacgttggaggtgttgggaacagcactgtcacatctttcaggtttgtagagttcctcttcagcatgaattattgccatgtctcttaagaattgagaacttatggctaggaatggaggctcatgcctgtaatcccagcactttaggaggccaaagtgggtggatcaactgaagtcaggagtttgagacgagcctggcaaatatggcaaaaccccatctctactaaaactacaaaaattagctgggtgtcattgtgggtacctgtaatcccagctacccaggagacgaaggttgcagtgagccaagatcatgccattgcactccagcctgggtcacaatagtgaaactgcatctcaaaaaaagaaaaaaaaaattgagaacttgttataggctttgccaaattcttcacacctgtagggtttctgtccagtatgaattatgtgtaataagtgttgagaacttccttacaaagaggtttgtcagcctggtgcagtggcttgtgcctgtaatcctggcaatttgggaggctgagatgggtggatcacttgaggttggcagctgaagaccagcctaaccaacatggagaaaccccatctgtactaaaaatacaaaattagccaggtgtggtggtgcatgcctgtaatcttagctacacaggaaggctgtggcaggagaatcgcttgaacctgggagatggaggtgaaggtgagccaagattgcgccattgcactccagcctggacaacaagagtgaaactccatctcaaaaataaataaataaataaataaataaatagataaataaataaataaagctttgttacagtattggtttctgtccactatgaattctcttatgtttattgaagtctgaggaccagttaaaagctttgccacattcttcacatttgcaaggtttctctccagtatgaattgtcttatattcacttagagttgaggatgcagtaaaggctttgccacattcttcacatttgtaaggtttctctccagtatgagttctcctatgtttatgggggcttgaggaccatgtaaaggtttttataccatttatagcatttctctccagtatgaattgtcttatgtatagtaaggtgtgaaaaatggttgaaggctttgccacattcttcacatttgtagagtttctctccagtatgaatcttctcatgttcactaagggttgaggataaaataaaggctgtgccacatttatcacacttgtatggtttctctccagcatgaattttcttatgcctagtaaggtgtgaggaatgggtgaaagctttgccatattcttcacatttgtagggtttctctccagtatgaatcttctcatgtttactaagggttgaggatgaaataaaggctttgccacatttatcacacttgtatggtttctctccagtatgagttttgttatgtgaagaaagggttgcaggatgtttaaaagctttgccacattctttacatttgtagggttgctctccagtatgagttatcttatgaatagcaagctgtgagggccagttaaaggctttgccacactcttcacatttgtaggatttctctccagtatggattatcttatgttcagtaagcgtagaggaatacttaaagccattgccacattcttcacatttgtagggtttctctccagtatgagttatcttatgtgtagttaggtgtgaggaccatctgaaggctttgccacattcttcacatttgtagggtttctctccagtatgaatcttctcatgtttactaagggttgaggaaaaaataaaggctttgccacatttatcacacttgcatggtttctctccagtatgagttttcttatgtgaagaaggggttgtgggatggttaaaagctttgctgcattctttacgtttgtagggttgctctccagtatgagttatcttatgaatagcaagctgtgaggaccagttaaaggctttgccacactcctcacatttgtgggatttctctccagtatgaattatcttatgtgtagtaagggtacaggagtacttaaaggctttgccacattcttcacatttttagggtttctctccagtatgagttatcttatctgtagtaaaggttgagtaccagttaaagtctttgccacattcttcacatttgtagggtttctctccagtatgaattttcttatgtgtagtaagggttgaggactggttaaaagatttgccacattctatatgtttcaaaggtttttttacagtacgtcttctgtctgtttgaatttgaaaattgatgaaagactttcacatatttatcacattgaaatattttgcaatgggtagttgtcaagcattggttaagcccattataacctcttttttgcaccttacactcatccacactttcacatcctttttttaactgtaaattgccatgtccacattttttatatcttctcagtatcactttttgaaaagaatcttttatgttctgctctagccaaagttcttgggcaaaatgagaacaaataactgaaagagacaataaaaacacaacacttcaactgctagactcagataaatatattttacaaatctaacctataaaatttcacagactacctaaggaagatgacatggcaaaataccacaagctgtaatttcttcctggacatataaatgtaacaaaaacatactgaccaaaatacaatttgtaaaaaatgtataagtgaattaagtgtgtgaagggtcccaggtgagcacaatgcaaagagccacatagaagataaagaaaagcctgttacttatacccaacacagctcttccatatctccagtataactctgtgcctttaaaagtaaattattggcctggtgtggtggcttgtgtctgtaaacccaacactttgggaggcagatgtgggtgaatcacttgaggtcaggagttcaagaccagcctggccaagatggtgaaaccccatctctactaaaaatacaaaaaattagccaggcttagtcatgggcacctgtaatctcagctactggggaggcggaggcatgagaattgctggaacccagggggtggaggttgcagtaagctgagattgcaccactgtactctggcctgggtacagagtgagaccccaccacaaaaaataaaaattaaaaaaaaaaagttaattgccaaccaggcatgatggctcatgcctgtaattccagcaatttgggtgaacaagatggaggacaaccagaggtgatcagcctgaccaacatggtgaaacctcatctctactaaaatacagaaaattagccaggggtggtaataggtacctgtaatcctagctacctgggaggctaaggcaggataattgcttgaactctggaggcagagattgtactgagccaaggtcatgcctctgcactccagactagttaatagagtgaggctctgtctcacacatacacacaaaaatgtaaattgccaactcctggtttcttttttaaaaaacaagaaaaatattgacacatacatctttatttctggcttctaggggcttttttagacactagttgatatgtcccatgacacaaaatgccaaaaaaaatggtgatatatgttagaatgacactttgagtctgaaggtaaattatagagaagcagagaaactgcagtaacccaaacagggaatgggtgtagtgaatgattacttattattaactaaacaataaacataaaattttaaacaagacacaccttaaaaacatgtttgaggaattctcagaatctagagtcaagacaattgatttcagactatgccaggacagagccatattataaagactgtaacaggtagctttttgttaatgtcctaatctcaatcaaaggttataatgtataccaaatattagagcaacatggccccatcaaaaaaattataaaattttcaaaagcaaccataaaaagtatgtaaagtaatttttaaaattccaaatgaattgaacagcccagtgttggtagctcattcctgtaatcccaacacactgggagatcaaggtgggaaaatcacatgaggtcagaagtttgggaccagcctgagcaacatggtgaaaccctgtttctgctaaaaatacaaaaattagctgcgcatggtggcatgtgcctgtaatcccaggtacttgggaggttgacacaggataattgcttgaatccaggaggggaaagttgcagtgagtggagattgtaccactgcaatgcagactgggcaacagagcaacactgtctcaaaaataaagtaaaaaaggccaggcacagtggttcatgcctgtattcctagcactttaggaggctgaagtgggtagatcatttgaggtcaggagttcaagatcagcctgcccaacatggtgaaaccccatctgaactaaaaatacaaaaaattatctgggcatggtggcaggcacctgtaatcccagctactcgggaggctgaggcaggagaattgcttgaaccaggaggcagaagttgcagtgagccgagattgagccactgcactccagcctcggtgacagaaaaatactctgtatcagaaaaaaaaccagaaacacagacaactattgaagatcagaaaaatgagaacaaaaagaaatactaaagtaaacacacacaaaaaattgtggatataaaaagtacaaaaaataactgaaaaatttattacaagaaaatacgtaaacatgaaaaagctgaaaaaacaaacttagatacacacaaatatatttataacacccaaataagcaaaatttcaaaaatcacatataagaatagaattttgggtgctgaagataaaaatgatgttccgtttataagcatagtctcatgagataaccagtgaatttatttaaaacatttttgcatgtcaaaaggaaactgatattgttaaatttataataataataaaaaagctgtcaaatgggaataataccatcagcaaaattgtactatcagataaaaagaagtccttccaaaataaccaaatcctgagaaagtatattggcactgcatacaccctacatatcaaagatgctgaaaggagtttcttccactgaaaataacataatgtaagaaaacaccacataatcatatgaaaatacataactttctggaaaagatatgcaaattcacaaaaatggtatttcttacttaacattatcataatgatacagaaaacatttttaattattctctaaatttaaaagataaaagtacagaaattattaacatctgttaatggatatacaacataagaaatataattaacaaaatcaataacaaagttgaaggcagatgttatgatgaataattttggtatgtaactgaagttaattttttaccacattaaaatacatttttggatattttagaggttttatggagtcccctggtaccactaagattatatctgtagagctacacaaaagtaaataagagggaactgaaagcctatcaatacaaaaataaaaaaaacacaaaaaaggcagaaagagaaaatgagagacaaagacacaacaatcaaataaaacaattaataaaaataacagtaaatttttctatttcagaaaactatttaaatatatatgttatctttccaatcaagaaacatactttttttttttttttttgagatggagtctcgctctgttacccaggctggagtacggtggtgtgatcggctcactgcaacctctgccttccagtttcaagtgattctcttgcctcagcctcctgagaagctgagattacagttgcctaccagcacacctgactactttttgtatttgttagtagagacacggtttcaccgtgttaaacaggctggactcaaactgctgaccttgtgattcacccacctcagcctcccaaagtgctgagattacaggcatgagccaccacacctggtggagtttacagtgagccaagatcacaccactgctttccatcctgggcaataaagcaagactcagtctcaaaaaaaaaaaaaagacggtacagaaaaactttaaaattcttttataaaatataaaaaactatgtaaatttgcatgaatcaatcaatagatacaccatatgaaataatttttataacaataacaaactagaaaatgtagaggcatagtttttgtgttcaattgaagttgttatgagattaaaacatattgttttaactttaagatgtatgtaatctctggttttcaaaatgattacaaagggaatatttgtagaaagtatggaaaagaagataaaaaataatcaaagcatgccagtacaaaattaaatgaaaattaagaaagtaaaacagcaaatgagaaaaatataactactagaaacacataaaacaataacaatataactggtaataacaacttcatttctttaagtaatcattgtaaatataaattaattaaactgcttaataaaatgaaatgtaattggaggactttcaaaggccaaggtaggctgatcacttgatcccaggagttcaagaccagcctggggaacatggcaaaactctgtctctacagaaaaaaagctacctgggtgtgatggcacttactggtaacccagctacttgagaggctaaaatgagaggatcatctgaggtttggaggttcagtcaccagtgaaccatgcaaatcagcctggttgacagagtgagaccctatctcaaaaataactgaggctgggcacagtggcttatgcctgtaatcccagcactttgggaggctgaggcatgcagatcacctgaggtcaggagtttaagagactggccaacatggtggaatcccatctctactaaaaatacaaaaaattagccaggcgtggtggttggtgcctgtaatctcagctactcaggaggctgaggcagtagaatcacttgaacttgggaagtggaggttgcagtgagttgagatcatgccattgcactccagccttggcaacaagagtgaaactttgtctcaaaataaataaatacatacataaataaatatacctaaagaaaaatccatagaatgcctcagtggtttcttaaaaagcatactgtatgctgcccacaaaagactcatcgtagcattgagtcaaataggctgaaagtaacagaaggaaaaaaatgtgtatttcatgaaaattgtaaccacaattgagtgaggtggtcataattatattagacataacatgctttaagtcaagcactaccattaggtgaagactgatattatattatagtaaagtgagttaatttaccaggaatctataactatattcatctatctatatgtatatgtgtatataacatcagggctccaaaatatataaagcaaatattgacaaaactgaagcaagacatacacagcaacgtaatagttgtagacatcaagaccccatttgcaataatagaaaattcagagaaaaaaatgaaaaacaaaacttagacaatattagactatattattttgcatacagaggaatacttcagagattataatttataaagaaaaaaattatgtggctcacactttggcagactgtaaaagaagtgtgtgccagcatctgcttctggtgagggtctcaaaaaacttacaatcatggtagaaggtaaagagtaactggacatattatatggtatgagacagagcaagtgtgaggtaaagaagccaggttcttttaatgaaccagctctcatctgaattaatagagtgtaaactttttggttaccaagaggatgtaccaagccattcatgagaaattttcccccatgacacaaaaatgtcccagcaggtcccacatccaacattgaggatttatcttgcagcatgagttctggagaacatggacatccaaaccatattatagaccaactaggcttcacagacacacacaaaactctccagtcaaaaccaagataatacataatattcccacttgcatctggtgtattctgttatgacatataccaagttttattaaatttaaaagtactgactaggtgcagtggctctcgcctataatcctaacactttgggagaccaaggtaagaggatccactggggccaaaagtttgagactagcctgggcaaaatagtgagatcctaacattacaaataagcaaacaattagccagacatggtagtgcatgtctgcagttctagctactcagaaaactgaggtgaaaggataacttgagcccaggaggctgaggctacagtgagccaaaattatgcctctgcactccagcctcaatgtccataagatcttgtctcaaaacaacaacaaatcaattaaaaaacactaaaattacacactcttgtgttttctaacaaaaactgaatgaaactaggaattaaaagcacaagccaaacaggcaaattcaaaaatatgtgaatataagacacattcttcaacatattcttgctcaggggtcaaaaaactttatttttcaaagatgttaatacaacctacagttaaaagctacagtaacataaacaatgtgatactgacacaaagataaacagatgaaagaacagaatagagagctccggaatgaacccttctgtatatgatcaaatgatcttccaaaaggttgccatgagtacaaaatagagaaaaatcatctcttcaaaaaatggtgttgaaaactgaatatcaacatcgataaaataaagttggattattttcttgaatgatacaaaaatatattttaaataaaatacttagacacaaaaaactaacaaatctttcagaaaaaatacaggaaaaagacatgacattgtcttggcaccattttcttagatatgacattaaatgcatgagcaacaaatacaagaatagaaaccattaactatagtagatgtcaaaatttctgtacatcaaaagaaaattcgagaatgacaacatatttagaaaatgggtgaatatatttgcaaattacatgtgaaaaaagttaatattaaaaatatatcaacaactctaaaaactaaaccataaagttcaataacttgatttataaatgaacaaacaaaactttcatcaaaaaactacacaaatgggaagaaacatttgacaggatgcacaaaattactcatttgcagagaaatgaaaaaaaaacacaatgacagcgaaatcatctcacacccattagaatggccactatatattttttaaaaaatgccaactctgttgatgatgcaataaaaatgaaacccatgttggttgttggtggaaaacaaagatgtagtcattattttaaaatgttattaatgttcctcatttatatatctatatacaaaatatgtaacacaggccaggtgcagtggcttaagcctgtaatcctagcactttgggaggccaaggtgggcaaatcacctgaggtcaggagtttgagaccagcttggccaacataatgtacgctatcttactaaaaatacagaaaattagctgagcgttttggcgggcacctgtaatccgagttactagagaggctgaagcaggagaatttcttgaacccaaaaggcagaggttgcagtgagctgagatcgcaccactgcacttccgtctaggtgacagagcgagactccatctctacaaaaataaatatataaatacataaatcacaggaatgaatgaatgaatgaatgaataaataaatgcaacagaggaccaggaagacatatttgaaaatccatggccaggcttggtggctcatgcctgtaatcccagcactttgggaggccaaggtgggtagatcgcctgaggtcagaagttcgagactagcctggccaacatggtgaaaccctgtctgtactaaaaatacaaaaatgagccggtgtggtggtgggcatgtgtaatcccagctactcaggaggctgaggcaggagaatcacttgaacctgggaggtggaggttgtagtgagccaagattgtgccactgcaccctgggtgacagagaaagactccgtctcaaaaacaaaacaaaacaaaacaaaacaaaacaaaaaagaaaagaaagaaagaaaagaaaatctatgtttattgcatcagtattcacaaaagcccaaaggctgaagcaacccaaatttctcttgatttataaacatatcaaaaaatataacatatacatacaatggaatatcgttccaccttaaaaagaacaatcttgtcacattttaagatgaacattgagaatattatgtcacttgaattaatccagtaagaacattatgggtactgtatgattccactcatatgagataccttaagtagtcaaaatcataaaaacaaagtggaaggtttgtctgtcaaggacgggagagagggtaaaatgagcagatgttacttaatgggtattgagtttaaattttacaagatgtaaggtttctagaagttttttgcataacaatgtcaatatacttaacatccctgaaatgaacagcttttcttttgagacaaggtctcactctgtcactgaagctaaagtgtagtggcacacctttgactcctcctcaacgtcccaagtagcaggtaccacagctgcacaccaccatgcctagctattactaaatttattttatatagaggggtctccatatgttgcccagactgatctcaaacttttgggctccagggatcctcctgtgttggccttccaaaatcctgggaatacagatgggagccacaaccatgcatggccctgaaatatagacttgaatagatttaagatggtaaattttatgttacgtgttcttaaaacaatttttttaaagaaaaactgaaaaatgtccagaattataaatcattttgaaaattaccttcaaatcacaaaaatgtttctctcacaaaagaaaatatatgttcatcattaaacacatggtgaaaataagactgtgtctatggctactcacttaaacaagaaaattttatggtcagttctgcctatatagaaactcacacagttttctgaggaaacgctctctggtactcactaaaagccacactcatccacatcctgatataaggccgagcgtatgcagacctgactgcaaaaacatgctgtagtgcctgccctactgagcaaagtcctgaaggatatgcagtctgtccaaaaataaaatgggaattacaactacccaagtccctgtatcaagccaactaaaggggaaccctagtgcagacccagcagccttgtgaccaagctacaacccctcttcactacaaattcagagggtgtctcatcaccctaagggcccaacaaaagatcattaccttctaaaataagtttatgaaaacatgaagtgtttgctccatcaaattcagacaccaatacaaaactatattgtgcccattgtcaatatttctattttaatgtagcactggaagcatgtggcagaattagtcaaagaaataaaaaaatccattaaaattaaagaaaaataagtaaaaattggtgtttgtaaatcatacaatcttatatttaaaaaaccataaacagcacattaaaacctgtctaaactgataaatacactcagtaaattagcaaaatataagattaacatacaagtatatgtatggtctcatacatttaaaacaaactgataaaatagagaaagacaaaaaccttatttactatagcattaaataatatacttcttagaaaaaaaataaacaaggaggtaaaaaatctttacaataaaaaaaaaagaaaaaattagagaagatccaaataaatttaaaaattggcatattatccaaagtgatctatagattcaataaactttctatcaaaattgcagtggtatttttttcatagtagtggaaaatacgattctaaaagttacatgaaactaagataactttgatagccaaagcaatcttgaggaaaaagaacaaagcagaaagataccatacttataatttcaaactgtatttcaagactacatagtaataaaaacagaatgtattgtgcagaaaaatgaacaaaaaatgcaatacaaactattactcttatacatttcagatctgatgcaaaaagagaacttaaaaaatagttttagtttctcaaaatcatgcagatatttttgtgtccccaaaacaatggaaaagcagccagattgagcagactcatatgtcataaagaggactttggttctcactgtgaacttgaaagaagctcaacaaaagaattcttagagaatttaaaagcatgatacagaagatgtcccttggtgagaacaaaattaaaaaccaaccagccaaccaaacaaacaaacaaaaaacagctgcccaggaactatttcctttagaacacagcttcccaggtcacattttaaggactggccttctcttggatgttgcgacctctcatttgtgtcatctgttgtattcattttcacttgcacctacctgggggtttggcaatcatctcatgtctcttcacggtcagaggtttttttccttgctccagacaggtgatcagttctggcttggagagaacaatacctgttttattaaaaataaatagcatgaatcttgcttatattgtttaattacaagctagtagtgtgctcagcagagaagatgaaataaaatattctagtaaattaatgccaaaatactaatttataacaaatttctaaatattaagaaataatttcaacttgtaggtttcttttgttttgctcttgttgcccaagctagagtacaatcactcaatctcggctcaccgaaacttcagcctcccaggttcaagcaattctgctgcctcagcctctggagtagctgggattacaggcctgagccaccatgcctggttaattttgtattttcagtagagatggagtttcttcacgttggtcaggctggtctggaactccggacctctggtgatctgcctgcctcagcctcccaaagtgctggcacctggccaccacactgggccctgcttataggttttttaaattttactacttggtactactgaatcaaaaatggcttgtgtcaatgagattttcaggtgggggcaacaatattttatgcaactaaatttctggaattaccactaatttagagtgaagaatagagctcaagtcaggaatgcagaagtttggattaaggtgaaacatcttgcagaaattcttttctacatgaacaaattctgaagattttctggaaaaaggccatctgaaactcttatgcaaagaataaattatttaaaaacattccactaaaaaagaaataaaacttttagggttttttgtgaattatgtatttaagttgtcctcaccaaggaagaccaggtgtctgtagttctctaacatcacatccctatataaattccgctgtgcagtgtccaggcaatgccactcctccagagagaattctatggccacatctgtaaattgcaatggcccctgaaacacacacacacacacacacacacacatttttaccaagtcgccatgggtggaatttttgacttaagatgaaatgagcgagtaaagagaactgattctgacttataggactaaaattatccagtaaaacaattttcaacacagaaatattccctattatattctctgactctgagaagagcagcataagatctacaacattatttcatgtatgatatttttctaaataataaagtataaaattaacagcatgaacatgaacatgtacatttttgagtgctatatttacatcacatggaattatgaatatttttcagatggaaaagacatgttgagttagaaggcacctctcaaaattttttttttttttttgagacggagtctcgctctgtcgcccaggctggagtgcagtggcatgaactcggttcactgcaagctccgcctcctgggttcaagccattctcctgcctcagcctccagagtagctgggactacaggcgcccgccatcatgcctggctaattttttctgtattttttagtagagacggggtttcaccgtgttagccagggtggtctcaatctcctgacctcatgatccacccgcctcggcctcccaaagtgctgggattacaggcgtgagccaccgcgcctggcctcaaattttaatatgtacaataagctgaagaccttatgcaggtttttttttttttccagaagatctggcataaagtctgattttttgaatttctaacaagctcaccaataatgtcaatgtttttgtcccaaaaaggatattttgtcaaacatgcagtaagtggaagagcatgtgtttttcccagttttcctggcctgtaaacaaagagccttcattttccaaagaaaagtatgtagaaaaaaaaaaagctgccagatttaatgtgatggtttatccacatcagctgcataaagataattaataatggggccgggcacagtagctcatccctgtaatcccagcactttgggaagccgaggcaggcagatcatgaggtgaggagatcaagacaatgctggccaacacggtgaaatcttgtctctactaaaaatacaaaaaattagccgggcatggtggggggcgcctgtaatcccagctactcgggaggctgaggcaggagaatggtgtgaacccaggaggcggagcttgcgttagctgagattgcaccactgcactccagcctgggtgacagagcgagactctgtctcaaaaataaaaaaaaaagataattaataatgaagagaaaaataattaactctacagtgaaaacaatctgtcagagagctatttcaccaagtgaattataaaccattaactgcacaaggacaaattttcatgatgcgctaatgcacacagaagaacacaacatcactgttgaaatattcctcccaaggaagtaaataaaatctgaatttaataataaagaaacatgtttatgctaatttcaaagtacagaaaactcctatgttctgtaatgttcagtagtaattttaaggagacttcatttagcacccaagagatcaggtatctcctaataatttttttcagaactttctgagtaataaatgccattccatataaataagtattgtcttaatcctgttctgcataaattaatgaaacacacagatggagcctcaacattacacgttctccatctttactaaggacaaaagttttccccaatagaaatcttgagtagccgcatctttccatgttcaacagccacaaagggaacatttttaatattgcagatcataacttattgctgagaatcctgcatggcatataagaagctatgacacagagaatgcagagaaagctctgggatatagaagaaaaattattttttcagagacccttgactatcgtaagaattttaagtagttaaaccaaacccagggagaaaaaacacaagtagagaagtaaaggtttgtgagtgctacatgcatggcagtccaggaggcagagtgaacacagctcttcatctgagacatgtttacctgaagagaagccttttttttttttttcacctcctcctctggaattccttgtcagatgagattctctggccaaattacccctgcatcttgagactatgcctttaaatgtgtcagcaccacatgtttacctgctagcatgacatcaactggcagaaaaagacagaaaaagtccacccatttctgttttttacaacaaaaagattcaagaacaatgagatgctccatgaagataaaaatataagtttctcctttcatgtcctctggtgccctttctgccacagacaccagcaatttctgctacagtaatggaaatatgtgccacactgacctgcccctaccaaaaccaaacagaacaggtcctgtgcgcaccacttagtgcaaaggtggaacttcttaactctcatgaaagtattttgagaccctcatacctgattctggcctccccttagagtcacgtgaagcccttcattaaaacaacatggatacttccacccagaacaataaacagaaccggtggggaaggcacaagagatttctgcaaattggccatgtgatcctaatgagaagcctgggctgataaccactaagctaagcattgcctctcaagctttaagaagcttataaatcacttggtaattttgactccactttatgtgattctgtaggtttgaaaagggtccataaatgggtgttttaaacaagtcccctgtcaatgctgatgttgcttctccttggctcattattagcattagagaaagcaggaatagcagagggtcccttacacttagaactcttgtcacaaccaaatacttctggtacaaataaggacaacacatctatgctaaagttttatattctttgctgggtctttaaagtttacagaggaaacagaaggcagcaatgtctggataagtctgcatttaaaaaacatgtacacatgtacaaatgcaatgtttattaagcaggtactttgtgctcaagagtatgatacagagcactatgctgggcataacatattatgtgatttaattcttgtaacattcttggagctagtactcagggtttaataatttccaggatttagataaagggcagagaatttttactgcctcttctgtttctctgttaccaaatttttttaaacattgtaaagaataaaagctaaatatatacagatgaaagagatatagaagagtttattgtagtttagagaaaattttattctgtttatgtttacttttctgtgacttgtggagcaactactggatctgcaggaatagaaaacaagttgctaaatagaatgtctctgccaacactggttttaacagaaaatttaaaaactaagactctacaatacatactttatttttcccatttatctgcttttgggtttcaggaaattggattcaccagccaaaactctgatatcttctaatcagttctgtgaggcaagactccagagtagggtcagacctaaataaggcctccaaaaagggtgaatctgaacatgtctgggacaaggtgaggatcctatagaattctgttctctatgccactgtggtactaacagttttctttttttctaatcttacctaaaagaaaaaccccagagtttctgtaattttaatattttctagcactgctctgtcaactttatactgtatactaatatgcaatttaaacaattctcttaaggttttctagggtaattttataagaaaatcagtgtgtacacttacgaaggtaaaagaacagaaattatacggctgggcacagtggcttacacctataataccaacactttgggaggctgaggtagatggatcatgaagtcaggagttcatgaccagcctgactaagatggtgaaacctcttctctactaaaaatacaaaaattagttggctgtggtgggaggcactgtaatcatagctatttgagaggctgaggcaggagaatcgcttagacccaggtgacagaggttgcagtgagccaagatcatgacacagcattccaggctgggtgacagactaagactccatctcaaaaaaagaaaaattaattataacaattctactgttcattaatatcccttcaggtggtaggtaccatgactgcttcatgtatttttttttaatgaccataagaaatggaagcaactagtttatctacttgggtctccagatctccttgtttatcatccaagtaccaggaaactggagaaactctcatccctgtacaaaccaaagacaactcttgtatgatgggttgaacaaacacagaatgactcatttttctttacactgagacagaagcagaattaaccactcttgtcagcctgacacaattctactctggacatcctcaaatgcctcaaagaaacctaggtgattgtgagggaattcccagtgacccagggctgatggcccaatgataagccaggctggagcgactcaggctgattctaaatagaaaataaaactgcgttggtggagccccagaacctgggtcacctgtcctgatatgctagcacttgggtaaaagacagaacaaaaatactctactccagtatcccattttacaggtaaacatagttgtggtcatggctctggatactttgtggcctgatctctcactcctaagatgattatttacacttacagattctgccatcagattctatttcctcctggagcctctcacatcactgtagcaggtcaatgaaaaagatgtaaaaaaactcaaaatgccacactctgaaatgggggctgtaagatgtctatcttgacaacttacaatgcagaaaataacttttgttaattttctgtacattccatatccaaagtctggcactttttaaatcccaggcagaggccggacctaatctgtagattctagataggatcaacctggctctgcatcctttggtgttacagcaaatggagtacaatcaaaggagagtaccctcatagaggctgctctagaacattctaagtgataagtctaaataaaaaaagctgacatatcaagaatataagtagacagtttatttggtttaagcttaaggattataaccagggagcaaagattcaagttgcctgaaatctacactttgattagcagcagttacaagatttgtaaagacaagagagggacatagagtggtctgatacaaagttgtttgtcagaagtttttatttatttagataaataatattgattattgattagatatatatcattattgtttagggtatagaatatagtatccaatgtggcattgttaatttactttatagctacttgtggcaatagtgaacagtttcaagggatgaatacatagttcaaaggggagagaaagatgttaactgctctttcattttaacatctctctgagtttgataaccaaaagtgcttgcactttttagataaaagttttttatttcccaaatctcaagatctggattcaaaatatggagctacagatttaggtcctgaatggcaggagtagcagcaggtgttacttgcacattagtgagcatttcagcaagagtagaaaggggatagtggagactttcttgtctacatgtctactcaattcacatgttactccagttcagtttgttggccccacggtctctgaatctgtttaaggtctgaaaatacaagagtcattgaaagagaaaaaattattgattgcttccctgtgaaatttgtagaaatctgatctagtctctctagcagtgactgtaaaggactctagataccaaataggcagggacacaattctgccttcatatttaggggacagcatgcactttgctgcacaagtgtgagttgactggaagcctgagaggaatagtcccctctagagtaagttccggttggcaccttatttgtgtttatatcatgtctggtaattctagacagtgtttggaaacaataattaaaagacagattttatccagctccagagaaactccacaataatagaacagaaagaaaatggttttattacacaattgaacttgaatgtgacatgcatcatggtcagtctgcttaagagactgcaaagatagaaagatggtcaccaatattagtccccaagcagaagaatttccagcaccatgtcatacatagttcatcctaaattcacctggagattgaagaggccatctgtgtatactaattgcttatattcaatgacaaataaacttttcacatcttcataacaggaggtagtttagcagcttgaagccaggtgcctgctgaaggtagcctcttactctgctacaaaaatggttgaatagggttcttttttgctatttacattttagagctgtggttctgtactccctgccactgggctacagcactcctgcttgctttctcctggttgctagtatgctctcttgacctctaccatgtgccactgaggcacagcccagagcacagctcacattttatgtgaatcccatttgccacagcagcactttagtgtcacatcagatagtgaagcctgagctgcaggaggagagcctgcaggcctcctgggtagaattacacattcacaataatggaaatgagagcagtgtttcaacctcagtttctacttataatggtgacaaggaaaaaatactgctgaattttcagcatgactcaagatagagatagctccaaaagttctcactatgacagcccacctcattcagaaaaaaatgggatattaatagggtttctgaaacagacacctaaagctttggagagacaaacagatctccgtctgagcaagattgagagaaaaaagctaaaactatcttaagaaaaagctcagattagatgtaagattgatgatgtcagccagaaaatattcccctgaaagcaatttctctctaaacacccaaagtgcacagctactctctgcatgagaaacattagcattatgaagaaaggggcaaagtctcagaagaattttatagtttcttttctatctctgctgatccatcatctcctagtcattgaataggggttctgtattgaaatacatctgacaacttcccacaacaccttctgatgaagaaatagaatctgactgtgttcatttattggaatatattagaacttgcaacatagctaactgaagagctactatggtttttggtggccacatcacctgtctttatttgtcatgtaatagcagcataccaatttagtgaaataaaagatattaaaattttgtttactcataattatccctattgaataaagtaataaacatgtcacactaatatctacttactgtgacaatttggtaataaattttctttagatattagatataaatatcagtatgaataattttaataaactagtaataatatatgtagttttaaaaattgcaactatacttcagttaaaacactttatatttcaaaagtataaattacaatattaaaataaccatgtaagtgattcattcaaagtaagtattgcggctttatattcatgttactgtagaaaatactgtttatggctcatgccttgtccacacttcgggaggctgaaatgggtgggtcacctgggtcaaaagttcaagatcaaactggagaacatggtgacacccatctctactataaatacaaaaacttagtcaggaatggtgatgcacacctgtaatcccagctactcaagaggctgaggcagaagaatcgcttgaacccgggaggcagcggttgcagtgagccgagatcatgccattgcaccccagcctcagcaacagagtgagactctgtctcaaaagaaaaaaaaaaagagaatactgttaaatgtatataaatgcaggttgtctacaaacattacgtataactatgctaattattctgaagtaataaatagaaagcaaggtacaactactgactccactgttaagtttatacactagactgttcttgtttttgcagtgcaagtacttcagcctgcaaatattggataatttccttagatcatcaggtttctgtcaaagaaacgtagtatcttttattgtttaccattctgtgttactaaatttaatcctatctttgtgctaagcttttttgtgctctaaaattagcttttacctaaacaaatctgtgtctattttaaaggactaaaaatgaaaaaaataaagttttcagaaccaaaaacaaaccaataaatctgaagtaccagataacgataatctggagtcagaaaaatgacaaaaggggatgggcatggtggctcacgcctgtaatcccagcactttgggaggcagaggtgggcggatcacaaggtcaggaggtcaagaccatcctggctaacatggtgaaaccccgtctttactaaaaatacaaattagccaggtgtggcagcatgcgcctgtagtcccagctacttgggacgctgaggcaagagaagggcatgaacctgggaggcagatgttgcagtgagccgagattgccccactgcattccagcctgggtgacagagcgagactctgtcttaaaaaaaaaaaagaaaatgaaaaagaaaaaatgacaaaagacattatttagctgttaatatgatttacatacatttcaaaaaagcagagaaaattgtctatatataatctaaatcccttaagcaaagagggaatagcaaaatatttttttggaacttattgaagagttttgaactcttggacatctgaaatttgcacactctatgcacttgacagaatgtttatgaaggaaaaaccagaaaagagaaagatgttataaaaaaatccatgagtgcacaagaccaatgcaacagaatagagagcccagaaataatgccaccctcctacaaccatcagatttttgatgaagctgacaagagaaatgtgggaaggattctctatttaataaacagtgctggaataactacctaacattatgtagacgactgaagctagacctcttcattataccgtatacaaaaatcaactcaagataaattaaagacttaagtgtaaaacttaaaattatggcggggcgcggtggctcatgcctgtaatcccagcactttgggaggccgaggcgggtggatcacgaggtcaggagatcgagaccatcctggctaaaatggtgaaaccccgtctgtactaaaaatacaaaaaattagccaggcatggtggcgggcgcctgtagtcccagctactcgggaggctgaggcagaatggtgtgaacccgggaggcggagcttgcagtgagccgagattacaccaccgcactccagcctgggcgacagagcgagactccgtctgaaaaaaaaaaaaaaaacagaaaccaaccaaacaaaaaaacccttaaaattatgagaaaccctccaagataacctaggaaataccattctagacatagaaactggcaaagacttcatgaggaagctaccaaaagcaactgcaacagaggcaaaaattgaaaaatgggacctatttttcaattgtgaagatcttaagagcttcttcacagcagaagagattatcaacagagtagacaacctacagaataaaggaaaatatttgcctctgacaaaggtcgactttccagaatttattaagagcttaaacaagtttacaagaaaaaaacaagcaacctcattaaaaagtagacaggacgggcacagtggctcacgcttgtaatcccagcactttgaggggacaaggagggtggatcacttgagaggagttcaagaccaacctggccaacatggtgaaaccccgtctctactaaaaatatcaaaaattagctgggcgtggcggcaggtgcctgtactcccaactactcaggaggctgaggcaggagaatggctcaaacccaggaggtggaggcagaggttgcagccagctgagatcacgtcattgcaatccagcctgggtgacaagagcaaaactgttgcaaaaaaaaaaaaaaaaaaaaaaaaagtaggcaaaggctgggtgcggaggctcacacctgtaatcccagcacttttaaaggctgaggtgtgctaatcacctgaggtcaggagtttaagatcagcctgataaacatggataaatcccgtctctactaaaaatacaaaattagctaggcatggttgtgtgcacctgtaatcccagctacttgggaggctgaggcaggagtattgcttgaacctgagagtcaaaagctgccgtgagccaagatcgcaccattacactccagcctgggcaataagatcaaaactctatctcaaaagacaaaacaaaatgaaacaaataaataaataaataaaactaatgtagaaacagaaaaccaaatgcatgttattatttaagtaagtgctaaataataagaacacatgaacacaaagaggagaacaagagacactgaggcctagttgagggtggagggtgggagaactaagaggatcagaaaacatacctgtttggtactatgggtaggacctcaatgacaaaataatctgcacaccaaacccccatgacataattttagctgtataaaaaacccacacatgtacaccgaatcacaaataaaacctaaaagaaaaaaatactccaaggtgggggagagtgcaatgtaggtgcatggactgcttttcactatagatagtagcccaggtggggctgtactctgatttatttctgtgtgaatgcaggtagatgaaattacaaacaggtggcccagaccctaggctggtggagaaaacaggttgctgctgcaaatttagtatctaggggtggggatatgccaggagacttgtagagatttttgggttcttggcaagaaacactaggatcaaaaatgccatggtgaagttcttgagggtggtgccgagtcctgggagaagtgtggatacctcaatttctagtgtgtgtgtttgtgagtgggtgggaatcctgtagtagcagctgcaagaaaaggggtctgtcataagagcttcttctgagttttcagtcctctgtcaccctgggagaagacctggaatcacaggacaatgggcaatgtgacagcctgtgtacaggagagcagagcctcccatttctaaacacccagagctttgttccagtccaggcctctgtgatatcttttttctggcaccaaatctgtagagtttgctgagcatcaaacaattctccaacaactaattgtctaacatttaaattctgacaccacccagagtcagcacagaccctgattcagggctcagttccacaacattgtcctcactgcagatgccagtcacaaaccccatgggcccatctacgcttctgagctactgtttgaaaactggggactcccaaaacctccctgaagttcaatgatttggtagagctactcacagaactcatcaaaacactgtagttatgtttaccggtttaatatataagatgcagcccaggaaaagccaaatggaagaaatgcatagaacaaagaaaagagatggggaaagatgaaacacatagataatcatgaaaaatgtttgtgattaataaaattctccagccgggcacggtggctcacacctgtaatctcagcactttgggaggccgaggagggtggatcacgagatcagagatcgagaccatcctggctaacagggtgaaaccccatccctactaaaaatacaaaaaattagccgggagtggtggcaggcgcctgtagtcccagctactcaggaggctgaggcaggagaatggcatgaacccgggaggcagagcttgcagtgactggagattgcaccactgcactccagcccgggtgagagatcgagactccgtctaaataaataaataaataaaaaataaattgtccatcctttgtgtactccaggaacagtttatggaaacacccttcaccttatgacttcaatggtgctcttttttcttacctatcacacaggcaaacacactctctgcacattttctcctatttctcattataaaaatcagctgattttttcttcagtggtcaattttttttttttttggtgtgatcgagtcttgctctgctgcccaggctggagtgcagtggcgccatctccattcagtgaaaccttcgcctcccaggttcaagaaattctcctgcctcagccttcccagtatctggcactacaggcgcccgccacaacgctcagctaatttttgtatttttagtagacacagggtttcaccatgttgggaaggctggtcttgaactcctgacctcaggtaatccgcctgccccggcctcccaaactgctgggattacaagcgtgagtcaccacccctggcctaaaataaagtaattcttaatgaaatttacttaagtttatctccctccgtcaggctcctgaactttgagctaccctcggtctgagtcgacatacaaccccatttacgtccctcctaagaacatgctgatttcagggtaagacattctgtgatctaaaatctgaccttttcaccctccatttgccattcccttcccacctcctttctaatcttgtttaatcctccttaggaaagaaagtccttttgtgcctacagttttgcaagccacaaagaccttatagtaagttgatactttctcctattgcaatacttttttggaattcattgttttacataaatctaacgttgttatcttacaaagtctaaaacttgcctcaaaacaaaaacttcattatcagtaagaccctcccagtttcctttcatcttaatcttaactgcatctgcctgtggggctccagctttccagggctctgtagcttctctcaggataaaggctctttccatagctggggtgagcaggctgggacatctgcagggaagtctccccagcaaaaaaagaactgggcctttaataacctcctgttggccgagtgcgctggctaaagcctgtaatcccagcaatttgcgatgccgaggcgggcgaaaaacctgaggttgggagttggagtccagcctgaaaaacatggagaaacctcctctctactaccacacaaaattagccgggtgtgatggcgcaggcctgtaatcccagttactcgagagcctgtggtaggagaatcccttgaacccgaggtagaggttgcggcgagccgagatcgagccattgcactgcaccctgggcaacaagagctaaactccatctcaaaatttaaaaaaaacaaaaaacaaaataaaaacacctcctttttgcagccttaatattagccttagcttggaattactaggttcaagcttcagtttccatgtcagtgttattcacctggtttttgaaactaagtgtttgaaaaatccagtgaaattactcaaacatagtgtttacataaacggagattttaagatactttttaaaattttattaaacaggagtctcgctctctcatgcaggctaatgtgcaatgacgcgatctcagcttactgcaacttccgcctcccggtttacataaaggaaggaaattttaagatccttacttttttttttttgcgatggagtctcgctctgtcgcgcatattggaatgcgacggcgcgatctcggctcacggcaacctccggctcccgggttcaagcaattctcgtgcctcagcctcccaaggagctgggattacaggcatttgccaccacgcctaattttcgtatttttagtagagacggtgtttcgccatgttagccaggctggtctagaactcctgaccacgtgattcgcccgccttgctctttgaaagtgttgggattacgggcgtgagccaccgcgcccgaccaggaagtggttttttaaccctaaggcagttttgtttttgtgttcttcccctattgcctggggtcagaccagatcatctaaactgatcccgactggcttagaccccaactttttccaaataggataaacggagatttgcagggaaagaagagggaagaaggcgtagtattgatttacaatttttacaatttatgacctggaagttgagtctttcaagaggaacttagttgtcctaacaaccctttacctcaagggatccgcccgcctcagcctcccaaaatgtgggattacaggcgtaagccaccgcgcctggccccataaatttttaatacgagaaaagagaaactgtgaaccccacggaccaaagctcttcccattcgggaacccgcaccccgagtcaagattctcccctaaagaccctctcgtggttcctgcacaatctgggagatacccggagctgtgggtgcagagctgcccagagagggctccaggccggggcacactcgctgccaagggaagagtcaggacgcccgggaccggcttatagagcacccgccatcttttttttttttttgagacggagtctcgctctgtctcccaggctggagtgcagtggcgcgatctcggctcactgcaagctccgcctcccgggatcacgcaattctgcctcagcctccctagtagctgggactacaggcgcccgccatcatgcctagctaatttttttgcatttttagtagagacggggtttcaccgtgttagccaggatggtctcgatctcctgacctcgtgatccgcccgcctcggcctcccaacgttctgggactacaggcatgagccaccgcgcccggcggagcagcttccatcttatggatggtggggactaacgccaagctgggcaaggagaactcagggcacagattgtggagctgactgcggggagccctgagtcccgccactgccacttcccatcaaccagtccctcccctctctggggatgttggaccggtactcttaccatttctagacttctagggggtcctggctcttggctgtggatctcccaatacctgcaggtcaaagggcctcagaggctgggcctctatgagcagagaacacagagcagtgaacaagagatctggagctccagcggcagcaagagacaaaggccgcgccataccagaaagccgtcctcttcgctccagctgcctgcctgattggagggtttccagaccagcctccctgattggattatgcttaaggctctgccccctcagtacctgagtgacagaagatgtaatcagattctgggctgagtgaaggagtaacagcctaagatgcagcctttccagacagggcttcctccctgagctgagccaggctcaccccagagaagggaacaattctgtatcttttttactctctctgtttttgaatgtattcaaaaggtgagcaggagtatttttctgtcatatgaataatacataatatttttgttcaagagaaaatcaacttttactttggtaatagtgtattatcaatactaaagctaattttaataaaaccttataaataaatcaaatttgccacttttaacctctcgagatttacacatatattttgtaatctcttgtaatttttttaactttttatattttatttttatctacattctattttttcaatttgaaacaacctttaagtaatttcaaattgttgtaggagatagaaagaaatcatttaaggccaggcacagtggctcatgcctgtaatcccagcactttgggaggccaaggtgggcagatcactttaggtcaggagttcaagaccagcctggccaacatggtgaaacctaatttctactaaaaatacaaaaaattagctgggcatgctggtgcacacctgtagttgtagctattccggaggctgaggcaggagaatcacttgaatccaggaggcggaggttgtgtaatggcccaaggggtacaccttgccctttggtttagacagagctgatttatcaagacgggccttttgcctagacagagcctattaattaagacaggagaatttgtggaggaaaagttaaatattaaatttgaactcaattgaatgtggacacagacaatggtcactaagtcccagaataggttgtgtgagccccttgaggcatttatccagtgctgtattggagaaatctgtaattcaatctattcccatacatttattattgaaaaacaataggcaatcacaaaaacaaattggcctttttgtgttccttgggcctagtcttgaaaggctgtcataactgggccttatgccaaacaacttgctacaaaaagagctagggtcccagtgtagcaggacaagccacagacaaaacctctcagacatcgagttgtagaaggaagggctttattcagctaggagcatcagcaagctgctgttttaaaatccaagctctctgaatgcacaatttctgtcctttttaaaggctcacaacactaaagatttcacatgaaagggtcgtgattgatttgagcaatcaagggttacatgacaggggctgcatgcaccggtggtcagagagaaacagaacagggcagggagtttcacaatgttcttctatacaatgtctggaatctacgaataaaatcagtttttaagttatgagttgattttttattattaggtttaggccaggcaggcccagggctgcctgtctttaacttcacttccttgtttttttcttaaaacaggtactgagtataaaacaataaaacaatatgagtgggtctctctcttccctcatttcctctctttgagactctcacttttttattagtgggagttctcactcttatttttgctacttatgtctttttgtgcaatagattgatagtgatttatacagtatgcttgtgctgaagtattttggtgaactaaggtagcgacgaagttttttatcatttggagaaatacaggtatcagacaagggagcagtaagcaggttcctgttactattattactcttattataagagttttaaatcttcctatttctggaattaatttctaaacatggctcttggattgagtctgtgccacacttgcacgggtacatgtgctagttttgttatatctttaactatatcttcaactacttgcccctgatcatctgtgtgtagacaacaattagtaaggttaaattttctacaaacttctccttcagctgctagcaagtagtcaagagctagtctattttgatagacagcatttctcatcagagtccctcatggggcaagaacagtcaaggcttgaccagttttattagtaataatttttaaaaacagcttgtaaccctatgatttggttgagcctgtagatgggggctcgatatccttatgagccatcttgtgcctaagtggcaggtctatagtattgtatgattttttcagggggccattcattatctttctaatcacctatggctatgcttcatttttcatgggaagcatagactgggaagcctagaaattcacctgtttttatggacagcaagaagaaatggacagcttaatggtgccaattacacagctacctgtctactgatcaggtagcttagcataagctctgtgtctatagatccagtataacctggtgggggctgtccagtcccgtggaattctgggtggacttaacaggctgcaactttggaaatttactgaatggatttctttctgtgtaattggaacttcaccatgtaactgtttttgtggtattattacacagcttttgtcctaggcaactaagtcaacttacagaatgagtgaattttgttctttttctggatatgcaatattgtccaataattgagacttttagaacctagaaatgatcagggtgattcttttgggccaggaattcatcaggaactgggtccgtaggcactaattcttgggcttcttatggccattgatcttttattacagtttatttacaaacataacatgaagtgatatttagagattgggctacatgctcggctaattgcaaaaacaaatttttagtttttcctggaatctcaggtactggcacatttagttcatcatagaaagtctgaaatactggttctgaagagtgtttttgaacctccttttattagcatgcttatactaggatctagtccttttccatcaatgcctaatgttacattatattttttgttctactttgggtctgaggggtttgtgattatcgattttaaaaggttgcagctcctacttgtgcaggaggggctgacttttcctttttggagctaaacaggatcttttttatctttttttcaagtagcctaaatgacacaagactagtattgacacatcttagataaatatgattcttgacagatatatacatttttttttactgtgtaacttttttttctaatttagagaactgcatcttattccatgctgcttactatcaatagcgcacaagcaccaaattttaaggttacatttttggggacccctctttcttctgttctagctattactttacttgtgtcacttagaaaaggaccagtcctaaattttattttaaaaatgctgatcatgggaagcttaaaatgggtcataacatgcatcaggttatttcttgggctacataccttggatagaatagcattatacaaacaagtttcttttagagtcctggtacacctacaataactataaaataataggactgtagcaatcttttgtcttacttcagtgacttgatgtatatactggaaacagttctcagtctgaggaaggtcagttgaagtctttactgtacaagtccaaattttaaggaaaatgagtgctgcaatgagtttcttcatgctttggctatgtgtggaccagtcagcttctgggtgtgactggagcagggtttgtggtcttcttcagagtcactttgcaggggttggcgaagctgctcctatctatgtacagctcctagtctactgatttttaagggtagtctcggaggttgggcccactagaataaaatgagcctaatacttctacacagtttatgtttaactgggctctctgatactaggagtaaggtggcggggttagggtgttgcaatcttcaatggttgtgtggggattttcacagagcaagctttggtatctagttagtctagcattcattagctaatggtgtcctttggtatttattaaaatcaccacagcatggggggactttatgtttaggttttgtctaagagttagcttatctgcttcttgtggtaacagggccattgctactagggcctttggacatgggggctagcctttggaaacccaaactagttgttttgagagattggccactggccttggccagggcctcacagtctgagttaaaactctaactgccattttttttttctttctgacacatagagtgtaaacagttttgtcaggtcaggtagcctcagggctgtggctgacaagagttttttttttttaacttgtgaaaagctcattgctgttggttgtaatagatgtagtttatctaatctacatttttattgactgtcatctcctaaaatattgacttaaatcctgtaactatttgatttcaggctttaaattgatctggtattccttgcggggctctaattgcatctaaatagatgtgagagttgaaagacctataagggcttctcctgctttatgatgtcctattatttatttatttatttatttatttcctctggttgatgaaatgccagtgtgaaagggatagccaaatggactaaaacacaaatgccactctagttattcggcagagtgcccagtaaaggtctaccacaataccaccacacatccgctcaaggatgaagaagggctgactgattgataagctcttgaaaattcttaagctcactgtatcctttcaggtctctaaggaatgctaagtcttagtgttcctaagtgttaggaagtgaacttagtgttgggagatggaagctggatggccttcggggactgacctgcagggacttcagaatatagcagagagaacttggcatgacttattactctagactgtagaatcctggaaaagagctatcatgcagcctatgcctggtcaactggaggaccacattagtggaagggggacaatcagggcctctggcctgccatgtgcacaagcataacaattgcttttgtttaaggtgcagatggaatatgtgatctattttaaccaggaatttgcatcttggtatgctgtcttaattgccaaagtttgttttaactctttaacttttatgatcctctagtaaaatgaacgtctcctttagcaccaatttttattagtttttagactaaagaaagctaaacaccactttatatttaataatgtttcttgtatgatttttataccagataagctaaattttacctttatattagtgtgttattaatattaatcttaattttaacataaccttgtagacatatttatcaaatttttcatgtttgaccataagttaagattttatagactatttttaaccttttataatttttgttaaagagcaggtgatgctttaagaaaaacctgttgcatttttactttaatgtccagttcacagaaaaactggatgatactgttttaactttagctaatgtgttcacacacagaattttctttataattaacattttaaaacttgcttaaacttttaaaacaataatttttttaaccttttaatgttggtaaaaatctacattcttatgcccttttataatctttttactaaaggtatattttacttttcttatacactttgcacataaacttttttttaaatagtacttaggaggctttattacttttaaattatataacatttttgaataaatttttttataacactttttctttcacaactttcaccaacaattcttcaacatgtctcaactttttgacttattacaaacatttattttttctttaaacaactagttaatttatttcaggacaagaatttaccatataacactctttttacataaattctacctcccccccccctttttttttttttgaagataacaattcctttttttaaagcgaactttctttatgtctttggactagactgtctaaggccacaagattagaagttaccataatacacgttacactgttaacttttagcaaacttcacttttgttgaaaactttgtaagtttgggatttcatttaccctttgctattaataagaccttgtttagtttaaattaacttggaattggtataggtggcctttttttctctctgccggtctttccttgcctctgccagccgcttatgctgctgttctcttaattactgtaggggggaagagggtctaaaaccagctgtaactgtctatgtatggaaactggtctgggtgccttggcttgcagattacattgtgtcatacttttgaaacaagggacctgtccaggcttccttctgatggtcaacccacctctaatgctggccagtctatttcacacaaagttctaagttttcttggtgtcatagtaacactgtaatctctattaaatcttttcttgaaatttttttaacatagttcctaatggggtgggcttacttatgcctgacctatgcttctttgagacaaaacactatgcttacaccacacacacaccacaaaacaaaacaaaaaaaaaaacaggtaaaaagggcacacacacacttttgcagtttacaccaaactaaaatcaaaaccaaaatcagagtatccagaaatctaagccaggtcaaaaccaaaactaaagtatcatgcagtctaagtcaggtcaaaaccagaacaaaagtgccaatgcaggcacactgtgggtgatcaggccactcttccattcagatggggtggggcaagttccaaagactaatcttaccaagtcaagccaagtcaaaaccagaacaaaagtgccaatacaggcacactgtgggtaatcaggccacacttccactcagatggagtggggcaagttccaaagactagtcttaccaagttacagatgtccagactccaaatgccagttccttctgggtgttcagccactgtgttaatcctctgtggggacctgctactcgctgctctggtgaggtgttccgccagggcaatttcctacctgggagcactctttggatcatgtaactcaggctggctggagtcccccgcagagatgctccacagggcaggcttaagccacctgaggggctgcctcagctgcccatcagttacctcatttcccagtcagagaaccaagaaatgtagcaggacaatccgcagaaaaaaacctctcagacactgagttgtagaaggaagggctttattcagctgggagcatcagcaagctactgctttaaaatccgagctctccaaatgcacgatttctgtcctttttaaaggctcacaacgctaaagatttcacatgaaagggtcagattgatttgaacaagcaaggggtatgtgacaggggctgcatgcaccagtggtcagggaggaacagaacagggcggggagtttcacagtgttcttctatacaatgtctggaatctatgaataacattgatttttaagttatgagttgatttttaactactaggtttaggccaggcaggcccagggctggttttgggcctggcgccaggctgcctgtctttgatttcacttccttgtttttttcttaaaacaggtactgagtataaaacaataaaacaatatgagagggtctctctcttccctcaccagagggggccaaagttttatgagacatctcctcatctgtgcacagatgggtggcggactctggagtccaggctgttgcttcccattctagtggtgaatcttccatagtctggtgagtgtaaatatatatacatctctttttccttctcctattcccattgcaatttgcttttatcaatctgcttattacattgatttgcttattatatctgaattgccatttatgtgggataaagtttgtttacccttaaaggtattgtgtgtgtgtcttttcttctccccttctgtgtttcccacacagaacatttttgtcattacaaacagaaatcaaaaacaaaagtgtgctgcttcttggccagaaggacagggctgatggctacgggacttcccataacctgggatgagaactcccgcagttctccccctttgtgatcgaatggtccaggggaactgacctttgtgagaactgggaatcttaattagtgcaatttaaacctttgcctgtgcatgaagtgctgcaggagattccagtcagcaaaggagctgctgagttgatctcccggagtggatggtgtttgcttactgcttataagttaatgtatcaagacaggggatggttgctacaagagaaatgtaagctggaaaagaaaaatgctagtctgacttccagactggccctggcccaatgccaggcctatgtcttgactgatcaggctcaaagatatccacctattgatgaaaaaagcagctgtccaaatggccccatcatggtaaaactgaagaactagttagctaggcttggagcaggtaaaaacccagctactggccaggcacagtggctcatgcctgtaatcctagcacttttggaggctgaggtgggtggatcatgaggtcaggagattgagacaatcctggcaaacacggtgaaacccagtctctactaaaaaatacaaaaaattagccaggcgtggtggtggctgcctgtagtcccagcaacttgggaggctgagacaggagaatggcgtgaaccagggaggcagagcttgcagtgagcagagattgcaccactgcactccagcctgggtgacagagtgagactccgtctcaaaacaaacaaacaaacaaacaaaataagcaaaacccagctcctgtctcaaggatgggaaattaaccttagtaaaattcaaggacctgcacaaagtgtacaattccttgacatcttatggaatgcagagaaatagcccattttaccaaaggctaaggctaaaataccagaatttgcaacccctagcaccaaaaaggaggaccagaaatttattggtttgtttggattctggaaacatgatattccccacttgggtaacattttacaacctctgcatgtagtcactaaaaaacactatgactttcactggggagagaaagagagcatggcttttaacaagctaaacaagtggtgcaactggccctggatctgtggcccatatgggatgggccagtagaactgcaagtaactgtcccagatcaacctgctaatttgagccttaggcagaaacctttcgggtttgggacccagaaactgccagaggctggcaaagcttatacccctttgtagaagaaattgttagcttgtgattgggctttgctgaaaagagaacaccactgcttcaaccttgatgtctttatgaggcctgaaattcctatcatggcttggtgtcatgaattccccaaaacccaccagataggacatgcccaaggaagtagcatcataaaatggaaatggtacatacaagaccaggctaagccaaaaccaaaggggttatcacttttacatgaggatgtacgaaacttgtccgctcaaaaaaccaccaaactatcctgcagataggaaagaaaccccccccacaatccacccaaaggggccaatcttttaaataactaagcccaaatgatcagaaacatgcttaatttatggatggatccacaaaatacattggtgggacccaatgctggaaggctgtggcttctgttaatcctgttaaaacataagcattactggccagatgcagtggctcatgcctgtaatcccagcactttggtaggctgagttgggcagatcacgaagtcaggggttcgaggccagcctggtcaacatggtgaaaccccatttctactaaaaattacagaaattagccagggtggtggtgtgcacctgtaatcccagctactcgggggagtgaggcaggaaaatcactggaatcccaggaatcagaggttgcaatgaaccaaaatcacaccactgtactccagcctgtgcaacagactgagactcaatctcaaaaagaaaaaaaaaataacaaacaaacaaaaacataagcattcctgatgaaggaagtggtgggagcagccagttagctgaactagtatccatattctaagctcttcaggaagaggccagagagatctgtcacttgtataccgactcttggtcagtagcaaatggtcttactacctctatgctccaatgacaacaaaacaaatggctaattgggaataaaggggcttggggaaaacaatactggaaagatatctcaatcctggcacagactaccattatcactgttttccttttttttttttttttttctttaacgcagagtctagctctgtcaccaggctggagggcagtggcacaatctaggctcactgtcacctccgcctcccagttcaagccattctcctgcctcagcctcccaagtagctgggattacaggcacacgttgccacccccagctaatttttgtagttttagtagagacaggttttcaccatgttggccaggatgatcttgacctcctgacatcgtgatctgcccacctcagcctcccaaagtgctgggattacaggcatgagccatcgttcctggccctttttccatgttgatgctcatgggtctctgctttcttttgacagaccatttaattagcaggaagatcaacaggccaaaatttccaccataactgtaaacttgaatgtgcatgaatggaatacaatgtgttcaagccttgcaatgagaggcattataatgtatggtgctataattggtagtgattaccggggagagttaaaggacattttatacaataccactccagatttttttgctataagaccgcagatgcctgttgctcaattattagtggtaccttgtcaacaattatcccgtgaggaaatctctgccccaacagaggctacatacagaattgggggattcagatccactcctacaggtagcttaaatcctggagccaatatatggatacagggttcaacagatcctgcccctaaggctggtgaccttgtagctatgaaagcagaaaatgaaggcatagtacaatttcctaaagatgaaaaacaatatgttcccctctgtttttgttattacaaggaataacctatctactaatggtcagcacctgtgtctttgtgtctaaagccaagaataaattcatttactaggtagccactgctgcaacaaaagccaatcacagagaatgttggctgtacatcgagttgccagaggctgccaggaatgggctaccttgaagaatcgtccctgacaatatttctgaatggctatgtcgttatcaatggggccacaacaacaacacttgtaatccaacctggacttcctttcaccacactaagcaatctgtctttgcccaggtcagacaaaaggtgaactccaccctcaccttccatcaaaagccttggtattttgcccaatattcctggaacggtatatattggaaacctgctgtgctggtggctggattccacacagcccctgcttcatctggaggccttaaatggctcctctaatgttactctggggtttctccagacaattgtcaacacatactccaaatcaacaacattgcccccaatgaaccacaatctctttcctattttaataacacattagtacagtatgtttacagtaggtccatggctgtcccctggggggccctctgggtatgcagatcctgtgggtgttggtacctgcccccacactgggcagggagatcacttgtgggtggccattaattccattcaccatccgggataatatccccctcccaagtaatctggatgcttacaaacaccactggttatgaatgtgccggcctccttggtggcgataccttatcacagtattctcccctgccgctagaacaatcctgcttcaccaacaaattaaaatattaagcttatatgtagaaaaagctcttaatgatagtagcactggacttatgctgttatcagatgaatttgctcagctgcgtactgttgtgttgcaaaatcaaatggcattagatatgcttaccgcagcccaaggaggggtttgcgccttactgcatactggatgttgtgtgtatatccctggcaattctcacaatattagtctccttgcaaagccatgagtatgtttttttttttaaattgtgcttttaattctcctatgcttaccctgtatccataatctatgtcaactatgagttccccatgtatctataacggtattttaatacaattgagtaccgaattgaggccgaatgttgacgaaaagttaagtattaaatttgaactcaattgaacgtggacacaaataaaggtcaccaagtcttggcacaggttgtgtgagcccctttgaggcgttcattcagcactgtttcagagaagtctctatttcaatctattcctatatgttagttattgtaaaacaatagccaatcacaataacaagttgacctttttgtgtttcttgagcccagtcacaaagggccctcgtgactgggcttcatgccaaacaacttgttacaagaagagctagggtcccagaccacactaaagcttcaagaaacctctcctagtctgtgcaaggactgttggctgactctggagcccagactgttgcttcctggtctggtgataaatcctccatagtctggtgagtgtaaatatatatatatatacacacatatatatatatattcccttctccccttcccattgcaattttcttattatataaatttacttactatatctgcattgccatttacgtgggataaatcttgtttatctttaaaggtattttgtgtgtatgtcttttcttctccactcactcatttcctgcaaagaacaccatatttctcagagcctttgttggttcctttttattattttttctttaatcgtgtctgcatgccttattttagcaaagtggtcttcaaactctgatatccttcttctgcttggtcagtttggctattgatacttttgtatgcttcatgaagttctcgtgctgtgtttttcagctccatcaggtcatttatattcctctccaaactggttattttagttagcagttcctctaaccttttatcaaggttcttagcttcattgaattgggttagaacatgtttctttagctcagcagagtttgttgttaaccgtcatctgaaacctacttctgtcaattcatgcatctcattctctgttcagttctgtacccttgctcaagagacattttgatcatttggaaaagaggcactctggcctttcagccattttttgttgattctttctcatcttgagtttgtctagtttcaatcatttgagggtgctgacccttggatggtttttttttttttttggacacagtctctgtcacccatgctggactgcagtggcaccatatcagttcactgcaaattctgcctccaaggttcaagtgattctcatgtctcagactactgagtagctgggaatacaggcatgcacaaggatgcctggctaatttttgtattttttagtagagaggaggttttaccatgttggccaaagtattgggattacaggtgtaagccactatgtgcagccttggatgaggtttttgtgggtacttttttttcttgttgatgctgttgttgttgctttctgtttgtttttctttcaatggtcaggtccatcttctgtagggttgctgcagtttgctagggttcacttcaagccctatccatctggttcactcccgtgcctagagatgttactcaaggaggttggagaacagcaaagaagaatgtctgttccttcctctgtcatctctgacctcaagagacacaaatctgataccagtagaattgctcctgtatagggtgtctgacaattcctattgaaggtggaatggggagcagatggggagcagaacccatttaatgaagcactttgactgtcctttggtggagggaggtgttttgctgtgggaaaatccactcatctgggctgcttaaatccctcaaaactagcaggaggaaaggctaagtctgctggtccacagagactgcagccacccctcctgctagggttctgctctgatccttgttatttctttttttctgctgggtttgggtttggcttgttcttgttgctctagttctttgaggtgttatcttagattgtctacttatgctctttcagactttttagtaggcacttgatgctatgaacttcccttttaacaccactattgctgtatcccagatgttttgttagattgtgtcattattattgttcagctcaaagatttttaaaatttccatcttgatttcatacaacaatcattcaaaaacaggttgattgtaaattttatgttttatttaatttccatgtatttatttaatttccatgtatttgcatggtttgagggttcatttggagttgattttcacttttatcccactgtagtctgagagagtagttgatataattttgattgttttaaatttattgagacttgttttgtggcccatcatatgtctgtcttagagaatgtttcatgtgctgatgaataaaatgtatattctacagttgttggttagaatattctgtaaatatttgtcaagactgtttgttctagattatagtttaagtcctttttttgttgttgttgtcattgactttgtcttgatgacttgtctagtgctgtcagtagagtattgaagttcctcatcattattgtgttgccatttatcccatttcttaggtctagtagtaattttttaataaattgggagctccagtgttaggggcatatatatttagaattgtgatattttcttgttggactagtccttttatcattatgtaatgtcccactttgtctttttctttttttaagtgtttttgctttaaagtctttttgtctgatgtaagaatggctactgttgcttgcatttggggtacatttgcatggactatcttttcccaaccctttaccttaacttcatgtgtgtctttgtgtgttgggtgagtctctggaagacagcagatttttggttattaaattcttatccattctgctattctgtatcttttaagtggagcattaaggccactaatcactatcaattatatcaccatacattataatgtctgtcattgcaaggcttggaacacatagtaatccattcatccacattcaagtttgcagttataataaaaattttggcctgttgatcttcctggtgattaaatagtctgtcaaaagaaagcagagacacataaacatcaacatggaaaacagtgataatggtagtgtgcaagaggattcagatatcttcccagtattgtttaccccaaacctctttattcccaattaaccatttgtttcattaccattggagcatccaggtagtaagaccatttactactgaccaagtgttggcatacaagtgacaaatgtttctgacttcctcctgaatagctcaaaagacagctaactgggagctaactggctgctcccacccctttcttcatcagaaatgcttatgtttttaacaggattataggtcatggccttccaccatcaggtcccaccaatgtatttggtggatgcatcagtaaaccaagcatgcctgtgatcctctggacttagttctttaaaggagttgccccattgtacaagggaggtttccttgcctatctgcatgactttgttggtggtttactgagctgtcaagttttttacaccctcatgtaaaagtgataacccctttggttttggcttagactgatcttgtatgtaccatttccattttatgatgctactttcttgggcgtgccctatctgatgagattgtgtggaactcatgacccaagtcatagtaggaatttcaggtctcataaagacatcatggttgaagcagaggtgttctgtttccagcaaagcccaatagcaagctaagaatttcttcttgaaaggagtataaggttttccagcctctggcagtttctgagtccaaaacccaaaaggtagcctcttcccatcttgtttctgcctaaggctccaattagcatgttgatttaggatagttacttgcagttctactggcatatcccataagggctatggatccagggccagttgacttgcttgtttagcttgttcagaagccatgctctctttctctctccagtgaaagtcatcgtgttttctagtgactgcatgcagaggttgtaaaatgttactcaagtggagaatatcatgtctccagaatccaaacaagccaatacatttctgggcctccttttcagtggtaggggttgcaaattctagtatttcatcttagcctttggtaaaatggatgatttccctgcattccataggatgtaaaggaattttacactagatgcctgtccttgaattttactaaggttaatttcccatccttgagataggagctgggtttttacccactctaaaccccggctgcctagttcttcaattttatcctgatggggccactgggacagctgcttttttcatcaataggcagatatttctgagccttatcagtcaagacacaggcctgacatggggccagggccagtctggaagtcagattagaattttccttttccatcttacgtttctcttgtagcaaccatcccctatcttgatacattaacttataagcagtaagcaaacaccatccactctgggagatcccatcaccatctcctttgctgactggaatcccctgcagcacttcatgcacagtcaaattttaaattgcgctaatttagattcccaattctcacaaaggccagttcccctggaccattcaatcgccaaagaggaaaactgggggagttcccatccctggatatgggaattcctcgagtttccatccctgtccttctggccaaaaagcggcacaattttgttttcgaattctgtttatgatgccaaaaatgttctgtgtgggaaacgtgaaaggggagaagaaaagacacacacacaataccgttaagggtcaacaagttttatcccatgtaaatgggaatgcagatataataagcaaatgatataataagcaaatcaatgtaataagcagatttatataataagcaaattgcaatgggaagaggagaagggaaaagatatatgtatgtgtgtgtatatatatatatattgcccaccagactatggaggattcaccagcagactgggaagcaacagtctgggcttcagagtaagccactagtctgtgcacagatgaggacaggtctcatgaagcttcggcacagtctgggaccctagatcttttgtaactagttgtttggcctaaggttcagtcatgagggctgttcgtgaatgggctcaagtaacataaaaaagtcaacttgtttttacaattgtctattgtttttgaacaactaatatataggaatagatttaaatagagatttctccaaaagagcactggattaaagcctcaaggggctcacacaacctgttctaggacttgttgatcattgattgtgtccacgttcaaatgagttcaaatttaatatttaacttttcctccacaaattcctctgtcttgataaattggctgtgtctaggccatgggcaaggtgaaccccttggacagttacacaactctgccctctgggttcaagcgattctcctgcctcagccttctgagtagctgggactacaggtatgcaccacaacatccagctaattttttgtatttttagtagaaatggggtttcaccatgttggccaggctggtcttgaactcctgaccacaagtgatctgcccaccttggcctcctaaaatgttgtgattacaggtgtgcgccagtgtgccctaaataatttcttttttttttttttttttttgtatttttagtagagacagggtttcaccatgttggccaggctggtctcaagctcctgacgtcaggtgacccacccacctcagactctcaaaaatgatttctttctatctcctataacagtttgaaattacttaaagtttgtttcaagtagaaaaaataaaaagaaagtgaataaaaataaattgtagagttaaaaatattagaagaaattacaaaatatgtatgtaaacctggagtggccaaaaatcatgaatttgatttatttataaggttttattaaaattagctttagtgttgacaatacactattaccgaagtaaaagttgttgaatacattcaaaaagagagagagtaaaaaagagataggacccccattcaatcgctaggagatgagacagcagcagagatggaaaagaaactttataaaattcttctgaaattctgccacctttcttcatattgctcatgtttctcatgctgagagtagctgtgcactttgggtgtttacagagaaatttcttttaagggaatatattctgactgacttgattaaacttacatcttgtcagagctttttcttaggatctttttaactttcgtctctcaaaataatcttgctcagatggagatctgtttttctctccaatgctttttctgtttcagaagccctattagtatcccatggtgtctgaataaagtgggctgtcacagtgagaacttttggagctatcactatctagagacatgctggaaattcagcagtattttttccgtgtcacaattaaaagtagaaactaagcctgaaacactgctcccatttccattattgtgaaggttcaattctatccagggggcctgcaggctctcctcctgcagcttaggcttagctctctgatgtgacactagagtgctgctgtggcaaatgagattcacataaaatgtcagctgtgctctgggctgtgcctcagtggcagatgatagaggtccagagagaacactagcaaccaggagaaagcaagcaggaattctgtagcccagtgccagggagtacagagccactgctctaaaatgtaaatagccaaaaagatagaacactattaaaccatttttgaggcagagtgaaatcctaccttcagcaggcacctggctttaagctgctaaactacgtcctgttatgaagatgtgaaaagtttatttgtcgttgaatataagtaattagcatacacagatggcctcttcaatctccaggtgaatttaggatgaactatgtatgacatggtgctgtaaattcttctaattgtggactaattatggtgaccatctttctgtctttgtgatctgttaaacagattgactatgatgcttgttacattcaagcttagttgtgtaataaaaccattttctttctgttctattactgggaagtttctttggggctggagaacgttttttttctgtttcttttttctttttttcttttttttttttttttgagacagaagtctcactctgttgcccaggctggagtgcagtggtacaggtgtgagccaccacacccagcccgatttttctgttaactattgtttccaaacactgtctagaattaccagacatgatataaacacataaaatgccgaccagaatttactctagaggggattttccttctcaggcttccagtcaacttatacttatgcagcaaagtgcatgctgtcccctaaatacacaggcagaattgtgtctctgcctatttggtatctatagtcctctacagtcacttctagagaggctagaccacatttctacaaacttcacagggcagcaatcagtcactttacctctttcatggactcttgtatgttcagacctgaaactgattcagatactatgaagcccagaaacttattcagagtaacatgtgtgcattgagtagacatatacacacgagaatctccactttccccttcctcctcatgctaaaatgcccacaaatgtgcaggtaaaacctgctgcgactccagcaattcagaccttaaatctacagctccaaatttttaatcaaggtcttgagatttttatcttaagttccattttatctgaaaaatgcaagtcttttggttatcaaactcagagagacattaaaatgaaagtgcagttatgtatttctcccccctttgaactatgcattcatctcttgaaagtgttcactattggcacaagtagctataaattaaacaataatcaatgttatttctgtaaataaaaatttctgaaaaacaactttgtatcatcccagtccctgtctctctcttgtctgtagaaatcctcttttaactgctactaatcaaagtgtagattccaggcaacttgaatctttgctcccagattacaatccttaagttgacccaaataaactgtctacttatatttatgttgtgtcagcttttttttcttttctttgaggcagagttttgctcttgttgcctgggctagatggagtgccaaggccctgtctcggctcactgcaacctctgcctcctgggttcaagtgattctcctgcctcagcctcccgagtagctgggattacaggggcctgccaccacaccaggctaaattttgtatttttagtagagaagaagtttcaccgtgttggtcatgctggtctcgaactcctgacctcaggcaatccactcaccatggcctcccaaagtgcttggattacaggtgtgagccacagcacctggctgcttttttttttttaatgtacacttatcatttagaatgtgctagaggggcctctatgagggcatctctcctttgattgtactcctcttgctgtgacaccaaaggatgcagagacaagtttattttacctagaatctgcagataaggtctggctactgcctgggatttacagaaaagggccaaactttggatagaaaatgtacagaaaactaacaaaaggcattttctgcattgtgagatgtcaacatagatatcttacagcctccatttgggagtgtggaattatgagatttttcacatcttgttcattgacctgcgacagttatgtcagagtatccaggaggaaatagcatctgatggcagaatctgtaagtgtaaataagcatcttaggagtaagagatcaaggccacaaagtatccagagctataaccacaactatgtttacctgtaaaatgtgatttttgtattttacctgtaaaatgagtatttttttctttcttttatgcaagagctagcaaatcaggacaggtaatccaggttctggagctccagcaaggcagtttcattttctatttagaatcagcctgagcctctcccgactggattatcattgggctatcagctcagggtcactgggaattccttcaaaatcacctagatgtctttgaggtatttgaggatgtccagagcagaattgtgtcaggctgagaagagtggctaattctgtttctgtcttagtataagagaaatgaatcatcctgtgtttgttcctcccctcatacaagaggtgtcttcggttggtacccagatgagaatttctccagtgtcctggtatttggatgataaacaaggagtaaatctggaggcccaaatagataaactagtttcttccattttatatggccgttaaaaaaaatacatgaagcagtcatggttcctacaatccagaaacttttagtctagactagcaactggataaaaaattgaattgtgcatcatatggttggtccaacaaatagatgtgtccaaaatcttgggctttatttaggccactttctttatattgttgtgacttctgatgtctacatctgaaggcatacttatgaacagccttgttattataatttctttttcttgagaccgagtctgttgcctaggctggagtacagtggtgtgatctcagctcactgcaacctctgctgccctggttcaagtgattctcctgcttcagcctcctgagtagctgggattacaggtgcctgccacctcacccagctaatttttgtattttaggtagatatggggttttaccatattggtcagtctggtctcaaactcctgacctcatgatccactggccttgggctcccaaattgctgggattacatgtgtgaaccaccatgcccagccttataatttctatttcttttactttgcttagtgtacatatttattttctaataaaatttccctagaaaggccaggcatggtggctgaaacctgtaatccaagcactttgtgggggcatagacaggtggatcatgaggtcaggagtttgagaccagcctggccaacatggtgaaacaccgtctctactattaatacaaaaattagctgggcattgcggtgcacacctgtagttccacctactctggaggatgaggcagaagaatcacttgaacccaggaggtgggagttgcagtgagctgagatggcaacactgcactccagcctgggcaacagagtgaaactccctctcaaataaataaataaataaataaataaataaataaataaatgaaaaactagcctagaaaaccttaagggatttgtttaaattgcatattagtacatagtataaagttgacaaagcagtgtctagaaaagattaaaattacagaatctctgggatttaagtttcttttaggtaagcttagaaaaaacaaaactggtggtacttcagtggcatggagaacagaattcaacatagggtcctcactgcagtgtctcagacctgttcagatttatcctttttggaggccttatttaggtctgactgtaccttggagtctggcctcacagaactgagtagaagagatcagagttttggctggtgaatcctgctgtctttctagagctggtgttcacaatttcctgaaacccaaaagcagataaatgggaaaaataaagaatgtattttagggtcttagtttttaaaggctctattaaaaccagtgcttggagagacattctatttagcaactggttttttcccctgcagatccagtaattgctccacaagtcacaaaaaagtaaatataaagagaataaaattttctctaaactacgttaaactcttcctttattatatctctttcacctgtctgtatttagcttttattctgtacaattttattaaaaatttgagaaagagaaatagaagaagaaataaaaatgctgggccctttatctaaatcctggaaattattaaacactgagtaccagccgggcgtggtggctcttgcctgtaatcccagcactttgggaggccgaggcgggcggatcacgaggtcaggagatcgagaccatggtgaaaccctgtctctactaaaaatacaaaaaattaactaggtgctgtggtggatgcctgtagtcccagctactcaggagactgagacaggagaatggcatcaacccgggaggtggagcttgcagtgagccgagattgtgccactgctctccagcctgggcacagagcaagactccatctcaaaaaaacaaaaacaaaaacaacaaacaaacaaacaaaaaattgagtaccagatttcagggcattatgagaattaaatcacataatatgttatgcccagtacagtcctctgtatcctagttttgagcacatagtacctgtttaataagcattgtattagtacatgtgtacatgctgttttttaaatccagacttattcagacattactgccttctgtttcctctgtaaactttaaagagacagcaaagaatataaaactttaggatggagatgggttgtccatatttgtacccagaagtgtttgattgcgacaagagtgctgagtgttaagagaccatgggctgtgcctgctttctctaactaatgctagtaatgagacaaggggaagcaacatcagcactgacaggggacttgtttaaaatgcccattcatggactcttttcaaacctgcagaatcacattacataaagtggggccaaaattaccaagtcatttataagctcgttaaagcctgagaggcaatgcttagcttagtggttatcagcccaggcttctcattaggatcaaatggctaatttgcagaaatctcttgtgccctccccacagcttctgtttattgttgtgggtggaaggatccatgtttttgagtgaagggcctcatgtgactctaaggtgaggccagaatcaagtatgagggtttcaaaatacattcatgagcattaagttccatctttgcactaaacagcagtcacaggggtggtgctgtttggatttggtagggaaaggtcagtgtggcacatatttgcattactgtagcagaaattgctggtgtctctggcaggggagggcacctgaagacagaaaaggagaaatttatatttttatcttcatggagcagctcattattcctgaacttcttctgttttaaatgacagaaatgggtggactttttctgtctttttctgccagttgatgtcatgctagcaggtaaacatgtggtactgacacctttaaaggcatattctccatatgcaggtgtaatttgttcagagagtctcatctgagaaggaattctagagaaggaggagaaagaaaaaaaatggcttttcttcaggtaaacatgtgtcagatgaagagctatgtccactctgcctcctggactgccatgcatttagtacccacaaacctttacttctctacttgtgtttttcctccctaatgattttgatttaactacttcttaaaattcttatgatagtcaagggtctctgaaaaatatttttttcctatatcccagagccctccctacattctctacatcatagcttcttatatgtcatgcaggattatcagcaagaatttatgatctgcaatattaaaaatattccctttgtggctgttgaacatgaaaagatgtggatactcaagatttctactggagaaaactgtggtacttagtaaagatggagaacatgtaatgttacggctccatctgtgtgttccattagctctatgcagaagaagattaagaaaatccttatttaactgggatgacatttattactcagaaagttctgaaaaaaaattaggagatatctgctctctagggtggcaaatgaagcctccttaaaattactactaacaattacagaacataggagttatttgtattttgaagtttccataaaactgatgtttctttatggttaaattcagattctatttacttttttggggaaagaatatttcaacagtgatgctgtgttctcctgtgtgcattagcacgtcataaaaatttgtcctcctgcagttaatgattaatgaatcacttagtgaaattgctgacagatttttttttactatggagttaattagttttctctttattagtaagtatctttatgcagctgatgtgcataaatgatcacatttaatctggcagctgtctttttttcttatgtttttctacatatttttctttggtaaatgaaggctcttagttttgtttacaggcttgaaaaactgggaaaaataccgactcttgcacttactgaatatttgacaaaatatccttcttgggacaaaaacattggcattactggtgagcttgttagaaattcaaaaaattggctgagcatggtggctcatgcccgtaatcccagcactttgggaggctgaagtgggtggatcacctgaggttgtgagttcgagaccagcctgaccaacatgtagaaaccccatctctactttaaaaaaaaaaaaaaaaaaaaaattagccaggcgtagtcacgcatgcctgtaaccccagctacgcaggagacaaaggcaggataattgcttgaatccgggaggtggaggttgcagtgagccagatcatgccattgcactccagtctcagcaacaagagtgaaactctgtctcaaaataaatacatttaaaaatcagactttataccagatcttctggaaaaaaaaaaaccctgcaaaacaaggtcttcagcttattctacacatcaaaatttgagaggtgctttctaactcaacatgtcttttccatctgaaaaatattcacaagtcattttgtatgatgtaaatatagcactcaaaaatatacatgtttgtgttcatgtccttaattttatactttattatccagaaaaatatcattatatgaactgatcttgtggatattatgctgctcttttttctcagagatagagaatacattagaaaatatttgtgttgaaaattattttattggataattttagtcagtcctataagtcagaatgagtgctctttactctctcatttcaccttaagtcaaattaaaaattccgctcatggcaacttagtaaaaatgtgtgtgtgtgtgtgctttacagtgaccactgcaatttagggatgtggctatagaattctctctggaggagtggcattgcctggacactgcacagcacaatttatatagggatgtgatgttagagaactacagacacctggtcttccttggtgaggataacttgagtacataattcataatatatcctaaagattttatttctctttttatttttattttttgagatggagtctcactctgttgcccaggctggagtgcaatggtgcaatctctgctcactgcaacctcagcctcctgggttcagtgattctcctgcctcagcctcccaagtagctgggattacaggtgactgccaccacgctcggctaatttttgtatttttagtagagatgggatttcaccatgttggccacactggtctcgaactcctgacctcaggtgatatgcccgtcttggcctcccaaagtgctggaattacaggcataagccaacatgctcagcctatttctcttttttgtagaatgtttttagacctttattctttgcataaaaaactttcagatcccctttttccagaaaatcttcaaaatttgttcatttattaaagaatttcttcaagatgtttcatcttaatccaaactttccacattcctgagttgagctgtattcttcactctaaattagtggtaattccagaaatttagtggcataaaatatttttgtccccacctgaaaatcgaattgccaccaccaatttttgattcagcagtaccaggtagtaaaattaagaaacccacaaattgaaagtattttctaaatatttagaaatttctgttataacttagtattttgctattaatttgctagaatattttatcacattctctctgctgagcacattactagcttgtaattggagaatatgagaaaaatttatgtatttatttttaataaaacaggtattgttgtctctaacccagacctgatcacctggctacagcaaggaaaagaaactttgaccatgaagagacaggtgatgattgccaaacacacaggtaggtgttttttttgctctcacaaaggggcatcttctgtcttatgcttttaaattctctaaggattctgcttttcttttggtgagcttccttcaagttcacagtgagagccaatgtcctcttcatggcatagaagagactgcacaatctgactgcttttccattattttggggacacacaaatatctgcatgatgttgagaaactaaaactatgttttaagttcccttttttcatcaggtttgaaatgtgtgaaagtagtagtttctgttgcatttttttgttcatttttctgcacagtccattctgtttttattattatgtggccttgaaatatagtttcaaattataagtatgatatccttctgctttgttctttgtcttcatgattgcttcggctattcaaaatttattttagtttcatgtaaattttagaattgtattttccattactgtgaaaaaaaaccacagcaattttgataggaagtttattgaatctatagattactttggataatatggcactacaataatatttattctttcaagccatagacaaaatattttaaaatttatttggatcttctctaatttatttatttttttattgtaaaaatgttttacctccttggttaattttttcctcagaaatttactaattaatgctctagtaaataaacgtttttctttatcagacagtttaagtgcatgaaaccatacatacacttgtatgttaattttatattttgctgatttactgagtgtatttattagtttagataggctttaatgtactgtttatagttttttaaatgtatgattgtatgacctacaaacagcaactttttactcatttttcaatttcaatggttttttttaaatttctttgactaattcttctgttacatacttccagtgctacattaaaatagaagaattgacaaagggcacaatatagttttgtattggtgtctgaatttgatggagcagacacctcttcaagtttttgtaaactgattttagattgtaaagatcttcttttattggttccttagggtgatgagatgccatctgaatttgtagtgaagagggattgtagcttggtcacaaggctgctaggtctgcactagggttcacccttagttggcttgttacaggggcttgggttgttgtaattcccattttatttttggacagactaaatatccttcagtacttttctcagtagggcaggcactacagcatgtttttgcagtcgagtctgcatatgctgggccttaaatcaggatgtggatgagtgtggctttcatgagtatgagagagcatttcctcaggtaactgtgtgggtttctatgcaggaagaactgatcataaactgtggctcaggtaactgaaactgagtcattgaaccacttcagggacctgagtaaaggccaaggtctgcagacctgcctgcatggctgtaaataggtgccttcctctgggtctctagaatggcaggacctctcccagacagtggctgggaggagtttgggacggttatatgataagttcagaattctcagaatctcagtttgggaccaagttgggtgaactctatcctggtctgtagccataaacaggaatcctgcactttcccacctaattgagggcctgctttctgagtagaacacttttcaatcctaagctttaacagagtttcatcactccttccctggatctcaaatctctcttacaggcacttattttggagatggggtcttgctacataacccaggctggtctcaaaattctggcctgaagcagtttttccaccttaatgtacgatgtagctgtcattacaggtgtgagccataatgcctggttctctcataaaggcatttttgtcagggatggctgacattattttgctgtaaggggatatgaatgtaggggacttttaatcttttcatcttactgatgtcactctccctatacatttttactttccattttctatttcaaatttttctgtaattttagattcagatatttaggacaatatgctagaatttgcatggtatgcctgatgtagttagaaaattagtaggtactccatatttactaaaagagttacttataaatgtaagtttgctacaggcaaaaaagaattataggattttcatctactttcttcagcctatatataaataataacatagtttatttcccaatatttgttttacatatcagaggatctaattctattctgcaatatatacatgtatattttctgtctttaacaatgtaagactattctttgcttctaaagttagaatacagcagtttcattttgtgtaagaataacatattcaaaacataaaactaactctagtttttttaaatgcttatttattaaaagtttctcattagaatcttctatttatgattatactgcatattttctgaaattttactgccacacagtgcatgccaatgattcaaaatacctgcatttaatgagtacacagtaacagctaaatattgcagttacccagacaaatttttttaaattatttttttgagatggactcacagcctgtcacccaggctggagtgcagtgctgcaatcttggctcactggaaactccacatcctgggttcaagcagttttcatgcctcagcctcccaagtagctggaattacaggtatgtgccaccacacctggctaatttttgtatttttatgtgagatgaggtttcatcacgttggcaaggttggtcttaaattcctgacctcaggtgatctgcccgcctcagcctcccatagtgctgagattacagatgtgagccaatgcacccagcctgacaaattctttttaatgatacatcaatgttgcataccaggttttatgagtaaactcttctcttattattgttttgaagtttcacattagtgtgtttctttaatgaaggtttctgtttttttgggggggacagagtctcactctgctgcccaggctggagtgcagtggcatgatctcagctcactgcaacctctgcctcccaggttcaagcaattcttctgccacagcctcccaaattgctgggactacaggcttgtgccacaacatctggcagatttttgtatttttcatcgagacagggtttaaccgtattggccaggcttgtctcgaactcctgaccttgtgattcatctgcctccgcctctcaaagtgctgggattacaggcgtgaacccccgtgccaagcctcatttatatttcaaatagggtctcacttggttaaccaggctgatttgcagggctcactgctgcccgaacctcccaaactcagatgttcctctcacttcagcttctcaaatagctgggttacacatttttgccgtcacacccagcttgcttttttgtattttttgtagagacagagttttgccatttgcccaggctcctgttgaactactgagatcaagtgatcagcccaccttggccttccaaagtcctaagattacatttcattttattaagtagtttaattaatttatatttaaaataattgcttaaaaaatgaagttgttattaccagttatactgttattgttttatgtgtttctagtagttatatttttctcattttctgttttactttcttaattttcacttaatcttgtactagcatgctttgattatattttgttttcttttgcatactttctataaatattatctttgtaatcagcttgaaaactgaagattacatacaccttaaagttaaaaaacaatatattttaatcttataacggcctccattgaatacaaaaactatgcttctgtattttccagtttgttgttaatattaaaattattattattattttttgagatggagtctccctctgtcgcccaggctgtagtgcagtggcacgatcttggctcactacaacctccgtcgccctggttcaagggattctctgcctcagcctcctgagtagctgggattttaagctcctgccaccacgcccagctatttttgtttgttttagtagagatggggtttcaccatcttgaccagtctagtgttgaatgcctcacctagtttatatggtgtatctattcacagatttatgcggatttacatattgttttttatattccataaaagcactttaaaggttttatgtaccatcattttggtttttttgttttgttttgtttggtgtgggattatttttttcagactgagtcttgctccatttcccaggatggagtgcagtggtgcgatcttggctcactgcaacctccacctctcggcttcaagcaattcttcttcctcagcctcctgagaggctgggattacaggtgcctaccaccatgccctgctaattgtttgtatttttagtatagatggagtttcaccatgttggccaggctggtctggaactcctgacttcaagttatctgcccgcctcagcttcccaaagtgctgggattacaggtgtgagccaccacttccagcctgtaccatcattttgatagtaaagaattccatatgtgtccatttatttacattagtgtatagctttatatttatatatgtttttatgatgctgtccagggtcaatttgtgtttcaacataatggacacattctaacatttctgtatttttagatatagaatctcattatgttgttcaggttgatgttgaacttttggtctccagtgatatgactgctttggcctctgaaagatgtaggattacagacatgaacaattgtgcctgagcctcttgtagtatttttttttacttttttttttttttgagacggagtctttctctcctagctcaggctaaagtgcagtggcacgatcttggctcactgcagttttcgcctcccaggctcatgcgattctcttgcctaagcctccctcccgaggagctggggttacaggagcatgccacaatgcgcagctaatttttttttttttgtagttttagtagagatggagattcaccatgttggccatgctgctctcaaactcctgacctcgggtgatctacccgccttggcctttcaaagtgctgggattacaggcttgagaaaccgtgcccggcttttatttttttaaatttttttaagagtgagtctcactctgtctcccaggctggagtgcaatggcatgattttgactcactgcaactcccacctcctgggttcaagcaattctgcctcagcctcctgagtagctgggactacaggtgtgtgccaccatgcctgggtaatctttgcatttttagtagaaatggggtttcaccatgttggtcaggctgatctcgaactcctcacctcaggcaacccacccaccttgacctcccaaagtgctgggattacaggcatgagccagtgcacccaggcccatgtattatattatgagagacagtgatagttgtgatgaatactctcaccttttattttggaaagtctttatttttatcttctttttgaagtaaagtaattttgaatcgagtattgttagaaattttttttgttacatcaaaattggggaagttttcagtttttttaatcttcgtgtaacctctatattactttttccctatattctaagatttgtttcatgaatacattgatctacttcatggtatccaataagttttatattctatgttttacttttgttccacaattttatatttttgtgttatatatattttgggtatgccacatcacaccagttaattgtattttaattttttagtttatattataattgtatatgacaatttttaactctgtacaatttaagacagtatggagcaaaattaaatatgaataagccatatgtctattgccaatataattatttatatgtttgtttgcctggataaatattatctttgtattttttgtcacttgtatatttattgtgtaggtttgctgtaacagttttttttttttttttggaagagaggtttgctcttgttgctcatgctggagtacaatggtgtgacctcagctcactgcaacctccgcctcctgggttcaagtgattctcctgcctcagcctcctgagtagctgagattacaggcatgcaccaccatgcccagcgaattttgtatttttagtagagacggggtttctccatgttggtcaggctggtcttgaactcctgacctcaggtgatctgcctgcctcagcctcccaatgtgctgtgattataggtgtgagccaccattcccagtctgtaacagttttttaatcctgtctaggtgagtagtcataaaaattctcctgatttcagcatttatttatgtgtgaatctatattttttcggtgggggagaaacacctaaagaaatgtgttatgtgtcaaaaacacataacaaaatttacaataaaatatttctaggctgggcacagtggctcacacctgtaatcccagaactttgggaggccgaggcgggtggatcacgaggtcaggagattgagaccatcctggccaacatggtgcaaccccgtctctacaaaaatgcaaaaaattagctgggcttaggtggcgggtgcctgtaatcccagctactcaggagggcgaggcaggggaatcgcttgaacacaggaggtggaggttgcactgagccgaagttgtgccgctgcactccagcctgggaggaagggtgagactccattttaaaagaaaaataagtatatatatatgtatataaatatatatatgcttctaaatattcagtttggtcatattaattctgttgacattgttatgcaacatatcactagaatatttttatcttgcaaagctaattctcaatagtcattaaacaactaccaattctagggccgggcgcggtagctcacgcctgtaatcccattactttgggaggccgaagcaggcgaatcatctgaggtcaggagttcaagaccaacctgaccaatgtgcagaaaccccgtctctactaaaaatacaacaaaattagccgggcatggtggcgcatgcctgtaatctcagctacttgggagcctgaggcaggagaatcgcttgaacgcgggaggtggaggttgcggtgagccaagatcgcaccactgcactccagcctgggcaacaaggtcctaactcggtttcaaaaaaaaaataataataataaagaaagaaagaaacaactaccaattcttctcattttgtggtacttttcaaacaccactctgttttctgtttctaagagtataattgctttgtatatctcatacaatctctgtctctttgtggatggcttattttattttgcataatgtcatcaatatttatcttaatagttgttagaatattttctgctttttgaaatctgagtgatattccagtatttttatatctactgaatgatttggagacagaaatttgcattgcttttacctattggcttccagtaacaatgttacaatagttatgtgaaagttaatatatgtgctgcattctgttttattagtctacattttcacctttataatcataccgaattgttgtaattctatacgtttttgatgtgtttgaaatcagaaattgtaatgcctccaacattgttcctttttctcaagattgttgggtactttattatctctttagattccatatacttttggagttggtgtttttgtttcttcaaaaatgcaatgagaaatttgagaaagattgtattaaatctgtagattaaattgagcagtatagacatcttcacaatattaattatttcttttttcattgtttgtttttgagatggggttaaattcacccacctcagcctcccaaaatgctaggattacaggcatgaaccactgcacccagcccagttatttcaacaagtgcatgctcaagagtgtgttgtatcatttctatatagatgtaaatttatcatttatttatattattgttttgtactctaattctatttttgtcatagaaaataatctatgaaatttcagttgtaaataatgtgttaagactttgtttttggcctaacaggtggtctataaagaagaatattgtatgagctatcgagaaggctgtgtatcctgatgttgttgaggagtgttctctataccttcattagaaataattgttttttactgccttctagtcctctgttccattactaatattatgtcttgttttattattattacagaaagtggggtattgaaatatcctactataatcatattgctctctctgtattcaattttgttagtatttgcttgatataattgaaaccctaatttgagacacacacagaaaaatacacacacgtgtataaacaaatttgtcataggttcccagtgaatgaatctatatattgtttaacgcccttctttgtctttttgaagttttgacttaaagtacattttataaaatatgacagtttttttacttaagatgtagcttgtgtaatattattttgacctcttctgctgtaatttggttaatatttatataaaaattctacttttgtcttgcaactttcagtcttttcttgtcattagatctcaactgactctttaaaaaggtaagttgagtctgatttttaaaactttttaatgaacctttttattgaaattatgtctcttgaatggaaagataattgtatatatttaaatagttttctgaaagagaaaaacttagttattttaattgttttatttgattattgtatccttgtgtgtcattttctctgtctttttgtgttgttttgatttttatattgacatgctttcagttttctcttattgttttttgtgtatccatatggattttttttagtggtatcttagggaattacctaaaacctctaaaagattcaacaatatattttaatgtagtaagaaattagcttcagttgcatacaaaaattcttattacatctgccttaaactttgttactgactttactaattacattttttatgttgtatattcatgaacagatgcttataatttctatacatttatcttttaaattttaaagaataattaaaaaagttttctgtaccattatgataatgttaagtaagaaattctatttttatgtgtgtacatatctttcccagaaatttatgtattttcatatgattatgtgttgttttcttgcattacgttattttctgtagaagaaactcctttcagcgttcttgatatgtaggacatatgcagtgccaatataattctcaagatttggttattttggaagaacttctttctatttggtagtacaattttgctcttatggtaatactcccatttgacaacttattttgaaattataattttaaaaatatcacagtttccttctgatctgcaaaaatttttttgataaattcactggttatctgatgagactatgcttatagattattattatatttatcttgcagcttgcaaaattcttatctgtgatttttgaaattttgcttatatatgtgtttgttataaatatatgtttgagtgtatcctagtttgttcagctttttcatgtttaccccattttttcttacttttaagaaatttttcagttttttttacatccactattttcattttctgctattttaatattttttgtggttaatctcatttttccgatcttcagtagttgtctgtgtttctatataacttcctggatattattcaatttattttatttatttattattctttttttttttttttttctgagatggggtctcaccctttcacccaagctggagtgcagttgtgtgatctcggctcactgcaacctctgcctcctggattcatgcaattctcctgcctcagcctcctgaggaactgggattacaggcacctgccagtatgcctggctaattttttgtgtttttaaatgaggtgggttttccccatgttggctaggctgatcttgaattcctgatttcaaatgaactgcccatctcagcctctcaatgtgttgggattacaggtgtgagccaccatgcttggcctattttattttatttttgagacagagtcttgctctgttgcccaagctttagtgcagtggcacatctccactcaccgcaaacttcccttcctggattcaagcaattctcctgtgtcagcatcccacgtagctaggattacagtcagataccaccaggcccactaatgtttgtatttttagtacatacagggtttcaccatgttggccaggctggtctccaactcctgacctgtgattctaccaccttggcctcccattgtgttgggattacaggaatgagcctccaaatatggtctgttcaatctattttgaatttttaaaattactttatacatttttaatgattgcttttgaaaattttataatttttttgatggggcaatgttgccttaatattttgtatacattgtaatctttgatcgatatttgaacattaacaaaaagccacctgttacaatctttataatatagctctgtcctggcatagtctgaaatcaattgtcttggctagagattctgggaatttctcaaacctgtttttaggaggtgtcttgtctaaaattttgtgtttattgtttagttaaatcagtttattaatatttcttcttaataatcagtaatcacttgctacacccatttcctgtttggggtactgcagtttctctgcttttgtaacatttaccttaagccttggcagactcaaactgtcattccaacatatatcaccatttctttcagcattttatgttgtgggagaccttaaccagtgccttaaaaagtccctagaagccagaaataaagatgtatgtgccaatatttttcttgtttttttaaaaagaaaccaggagttggcaatttacatttgtgtgtgtgtgagacagagtctcactctgttacttaggctggagtgcagtgacattatcttggctaacaacagtctctgcctccagagttcaagcaattctcctgcctcagcctcccaagtagctggattacaggtacctgttaccatgcctggctaatgctttttatttttagtagagacgggtttttaccatcttggccaggctggtcttgaacacttacttacccttgtgattcaccgacctcagcttcccaaagtgctgggattacagacttgagccatcctgcctggccaggaatgtacatttaaaggcacaatgttatactggagagcaggaagaagtgaagaatatttcttctaaagacagccattagaaatataaagggggttgtagtgcctttacttgcatcatagatcttattgcacacattttgtactagaggaaaaccctgaagcagttgctcaagctttgttcaacattggaatttatattggagaagagtcctgaaatataatgaatttaaaaacacttatatttcaaaaactacagcttagaaaacaccagagagtttatactaaaatatatttttgcagatgcagtaaatataaaaaaaattaatttaaaattgattttatgtaaatatcagagaatttacggtagaataactaaggcactgacatttcagacattacagcaaatcagtgttgagtataaaaactaatctacagctacagctgttagataaattgcttgtatataactttaaaaggagtagatttttgaagcatggtaattctattgaaagtatacttatttgcggccttgagcagtggctcatgcctgtaatcccagcactttgggaggcagaggtgggcagatcacgaggtcaggagatcaagaccatcctggctaacatggtgaaaccttgtctctactaaaaatacaaaaaaattagctggatgtggttgcacacacctgtagtcccagctactcaggaggcttaggcaggagaatggtgtgaaccctggaggtggagcttacagtgagccgagatcacaccactgcactccagcctgggcgacacagcaagactctgtctcaaaaaaaaaaaaaagaaagtatacttattcgcttgaaaaaaattttttgaaaagtgaataatgatgtaatacaggtttcaagttactttatgctgttattttattcctatattattcacacatgaaagcatgtgatcaattgttgatgcatcagagatactagacattgttttttattagttgggcattatttattaccttttctataaaagagtaagaacattaaaatgtaagatgcatgatgaaaatgtaagtggagaggctctttgtagtaaacctctattaagtaatgtataaggtggtggtttgtgttctcatttgtgtaatcctagcctatgacttaatgttgacactttgctttgtcttttggatggcctaacctacattaacatatacgcagaacattttaaacctttttttcaaaaatcataaagaattactttatcaataaacaaaggtaaacaataagctgagggttcagagtaatacttttctacattatagtgagagaaataaattattaattatagtcaaaagtattaaaataaattagtattgcaggctgggcgccgtggctcatgcctgtaatcccagcactttgggaggctgaggtggacggatcacgaggtcaggagatcgagaccatcctggcaacacattgaaaccctgtctctactaaatatacaaaaaattagccgggtgaggtggcaggcgcctgtagtcccagctactcgggaggctgaggcaggagaatggtgtgaacccgggaggtggaggttgcagtgagccgagatcgtgccactgcactacagcctgggggacagagcatgactcagcctcaataagtaaataaataaataaataaataaaaataaaataaaataaattagtattttactaattgtacttttaagtaataaaatgtattacatttaaaaattgttagattatgtgtgaacttaatttttttaccatgttaagcctattgtgcatttaatgaagcattttttttaatgaagcattattatgccactaactttaaactatttctccttacccaagcgtgtaaataaaagatggtagcaatatactatttggtatatagtggaataacatctctagtaatcactttgccaatggctttaaactgtaaatgtattgaagaatattgttcccataggtcaaatttttattctttattcttattgaaatgtattattagtatttatgagtatgtagtatgtgtatatatttatgccttatatggcatattttgagttaggcatataatatatagtaattactttagggtaaataagatagccatcagctgggtgtggtggctcatgcctgtaatcccagcactttgggaggccgaggtgcgtgaatcatgaggtcacgagattaagaccatcctggccaacatggtgaaaccccatctctatttaaaataaaaatattagttgggcacggtggtgcgcatctgtaacctggaatcccagctacttgggaagctaaggcaggagaatcacttgaacctgggaggtggaaattgcagtgagctcagaatgcaccactgcacttcagcctggtgacagagtgagactctgttaaaaaaaaaaggtatccatcacttgtagcatttatccttttattacaaactgtaattatacatttttagtgtataatttagtgagaaggattgcctggtgtcaggatttcaagaccattttgcccaacatggtgaaatcccatctgtactaaacataaaaaatttagttgagcatggtggcacacgcctagaggctgagtcaggaaaatcacttttaactccagaggtggaggttgcagtaaggcaagatcatgccattgcactccagcctggttgacagagcgagacttcatctcaaaaaaagagaaagaaatataaataaaatccttacatttctgagtcctgaaaaattattaaatatttgttatatagttttcttttaacatttggtctctctgcctgcgaacatatagacttttagttttaatttatgtggggaaaagtgagagaaatcagattgttactgtgtctgtgtagaaagtagacatgagactccattttgttctgtactaagaaaaattcttctgccttgagatgctgttaatctgtaaccctacccccaaccctgtgctccctgagacgtgtgctgtgtcaactcagggttaaatggattaagggttgtgcaagatgtgctttgttaaacagatgcttgaaggcagcatgctccttaagagtcatcaccactccctaatctcaagtacccagagatgcaaaacactgtggaagaccgcagggacctctgcctaggaaagccaggtattgtccaaggtttctccccatgtgataacctgagatatggcctcatgggaagggaaagacctgaccatcccccagcccaacacccataaagggtctgtgctggggaagattagtgaaagaggaagacctctttgcagttgagataagaggaaggcctctgtctcctgctcatccatgggcaatggaatgtctcagtgtaaagtccaattgtatattccatctactgagataggggaaaactgccttagggctggaggtgagacatgctggcagcagtactgctctttaatgcattgagatgtttatgtatatgcacatcaaaagcacagcacttttttctttaccttgtttatgatgcagagacctttgttcacgcgttttcttactgaccttctctccactattaccctattgtcttgccacatccccctctctgggaaatgcccgataatgatcaataaatactaagggaactcagaggccacggcaggcaggcgcggttcccccttatgctgaacgctggtcccctgggctgatttttttttctctatactttttctctgtgtctctttcttttccaagtctctcattccacctaacgagaaacacccacaggtgtggaggggcaacccagcccttcaaatttacatagagttaaatatacacatattactctgaagataaatcttaggtgtaagaaaagtattaagtgagtgtttgtgtgagtatgagtttgtacatattttcaggagaaaagagcaataattgcaacaaaatgaataaataaggtgactaatagaaaactaaacacctcaaaaatgctgaaagcaaatctatactttttgctttgtcttgaattcctttattcattttattttattttatttttttgagacagagtttcactcctgttgcccaggctggagtgcaatggcacgatctcggctcactgcaacctccaccttttgggttcaagtgattctcctgcctcagcctcccagtagctgggactacaggcacatgccaccatgcccagttaatttttttttttgtatttttagtggagactgggttttaccatgttggccaggctggtctttcattcctgatctcaaatgatccatccacctaggcctcccaaagtgctgggattacatgtgtgaactgccacattcagtgtgtcttgaatttattaatgtaaaatgttatggcttatggtttggattctccctagaatctgcctattaaagcacaggcatctttgtcttcagaaatgacactcttgagtagaacaataaaaaccctcttcaaacagaaaaaaataatcatttttaacacttattttaatgaaaatttaaccaacattgagtaattggatatatttttattgttttatgtgtgtgtgaatgtataaaatggtacatacaggaaaaataattcaagccagaaaaaagatgtaagttaatatttgtaatgaatgaaactggagagtagttaattattatttgcagataatatatttgtttatgtagataacaaaaggagcagaaagactattttaaaagtttatttaggtgggtaggcaacattttaagataataccctggattaccagtctgttgcacacctgctgtgtcatactttcctcttgagtgaaaaaaaaatgtatgactgtggtgggaaatcactcatgaaattaggttactcaactgttgactttgtgtttatcaaaatggagattattctgattgtgttaaacttaatcacaggtgcttctaagagaaagagacacatagaaaaacaacctgctggcctgattgttttgtgtgtttttctgtgctggcttactttacttggcataatatttttcaggttcatgaatattgttgcaaataacaagactttcttatttttaagtgcagagaagtatttcattgtgtacatataccacattttctttttctattcaactattgatggacacttaggatgattccataccttagctattgtgagtaatccacttccttccctctgttttgttttgtttgagatggagtctcattctgttgcccacgctaaagtgcagtggcacgatctcagctcaccgcaacctatgcctcccaggttcaagtgattctagtgcttcagcctcctgagtagctgaggttacaggtgtgcaccaccatgcttggctaatttttgtatttttagtagaggcaggctttcaccatgttgaccagagtaactttcatttgtttgtatatatttttcttccttttctatttctagaagcatgttaattttaaaatataaattatgaatgttaaaaaccttcattctctgtctttgattactattacaactgatttaaaaataagtttttttgaaattccctggataaaggttattacttcattattaacataacttgagacagcatagaaatgaaagtgaatatttgatagtaaaacagcaattatgtagctcctggtagtcatttaatctctcacccactctttggaacttctatcaagacaagaattctatttttgaaatgcttatgtttttaacaggattataagccacagccttccagcatcgggtcccaccaatgtatttggtggatccatttgtaaaccaagcatgtttctgatcttctgggattagttttttaaacgatttgcgccattggtcggggtgggaagggtggtttccttccatatctacaggacttgctcagtggtttttttgagctggcaagttttgtacatcctcatgtaaaactgataccccctttggttttggcttagcctggtcatgtatgtaccatttccattttatgctgctactttcttgggcatgccctatctggtaggttttgggggaactcatgtcccaagtcacaataggaatttcaggccacataaagacatcatggttgaagcagaggtgttccatttccagcaaagttcaatagcaagctaaaaattgcttcttgaagggatataatctttgctggcctctggcagtttgtaggtccgaaatccaaaagtaccctcttcccatgttgttcctgcctaaggctccaattagcatgttgatctaggacagttacttgcagttctactggcccatcccctataggccatagatccagggccagcttcaccacttgtttagcttgttcaaaagccatgctgtcttcctctccccaaagaaagtcatagcattttctagttgctgcatgcggaggttgtaaaatgttacccaagtggggaaaatgatgtttccagaatccaaacaagacaatacatttctggacctccttcttagtggtagaggttgcaaattgtagtattttagctttagcctttggtaaaatggactatttctctgtattccataggatgccaaggtgttggggtgatcagacccaacaccaggtcataggggctatgaagtctgatagagtcaaagaatgagacaagacaagttaaaagttcatagggtgggtccagggggccaactccaagcatggtggctgtgaagaccccaagctctgggagcccatgctatttataacttataacttattggtaatcaaacaaaaaagcagttggtgaggacatgtggacatgggggtagacaggtgaggatgtgcggatagaaaggtagtggtgaatcaagcgtagctgtgatggttgagcatatgctctgctacttgagataaaggagaacaggttcttctaattcaagacacaatcaatttatggtctcaggagagcaagaagcaatgggccaacgagtctggatacattccagaggctacaaggggttttatgccctgagcctgggttctgtccaagccacaaggggttttatgccctgggcttagactgtagtgtggcagggcagccttccaccctttggcacagagcttggtgttccacaggccacaaggggttttagaccctggaaccaggacatgttccaagactcttttatattatgtcagacaagcaagccctgcctcagctcttctgccaacaccaaggaattttacagtttgtgcaggtcctttgaattttactaaggttaatttcccatccttgagataagagttgggctcttacccgctccaagccccagctaactagttcctcagtttcaccctgaccaggccatttagacagctgcttttttcagcaataggctgatagctttgagcctgatcagtcaagtcataggcctggcattgggccagggccagtctggaagtaaaattagcattttccttttccagcttacatttctcttgtagcaactagcccttatcttgacacattaacttataagcagtaagcaaacaccatccactctggcagatccctcagcttctcctttgctgactggaatctcctgcagcacttcccgcacagtcaaaggtttaaattgcactaatttagattcccaattcccacaaagagcagttcccctggaccattcaaaagggagaactggaggagttcccatcgcgggatatgaggagtcaccgagcctccagccctgtccttctggccaaaaagtggcacacttttgttttgaatcctgttcgtgacgccgaaactgttctgtgcgggaaagaggcaaggggataagaaaagacagacacacaatacctttaagggtaaacaagcttcatcccatgtaaatggcaatgcagatatattaagcaaatgatataataagcaaaaaaaatataataagcaggttgatataataagcaagttgcaatgggaagaggagaagggaaaagtttgtgaagtttacgctcaccagactatggaagattcaccaccagagtgggaagcaacaacctgggctccagagtcggccacccatttgtgcacagatgaggagaggtctcatgaagcttcagtgcagtctgggaccttagctcatttgtaacaagttgtttggcatgaggcccggtcatgagggccctttgcaactgggcttaaggaacacaaaaagattaacttgtttttgcgattgtctattgtttttcaaaaatgaatgtatatgaatagattgaaatagagatttctccaaaacagcactggatgaatgcctctaggggctcacaaaacctattctgggacttggtgaccattgcttctgtccacgttcaattgacttcaaatttaatatttaactttacctccacaaattcctctgtcttgatgaatcggctctgtctaggcaaagggcaaagcgaaccacttgggccttacacaacctttacctcctcgattcaagcgattttcctgcctctgcctccgaagtagctgggactataggagtgcaccaccacaccctgctaattctttgtatttttagtagagatggtgtttcaccatgttggccaggctggtcttgaacttctgaccccaagtgatctgcccaccttggcctcccaaagtgctgggattaaaggcgtgagccaccatgcctgtccctgaatgatttctttctatctcctataactgtgaaatcacttaatggatgtttcaaactgaaaataataaaaagaatgtacataaaaataaaatacaagaagtcataaaaattagaagagattacaaaatatatatgcatatctcgaggggtcaaaaatgagaaattttgtttatttacagcgttttgtttatttatttatttaattttttttgagatggagtctcactgtgttgcacatgctggagtgcagtggtgtgatcttggatcaccgcaacctccacctccctggttcaagcaattctcctgcctcagcctctggagtagctgggaccacaggtgcatgccaggaggcctggctaatttttttgtattttcagtagagacgtggtttcaccatgttagccaggatcgcctcgatttctttctatgtcctatagcagtttgaaattacttaaaagttgtttcaaattgaacaaataaaaataatgtgcataaaatataaatagtttaaaaaattacaagacattacaaaatacgtatgtaaatctggagttgtcaaaaatgacaaatttgatttatatataaggttttattaaaattagctttaatggatactacactattaccaaagtaaaagttgattttctcttgaacaaaaatttgttgtattattaatatgacagcaaaatacttctgttcaccttttgaatacattcaacaggagagagtaaaaaagaaatagaattttcccatgctctgggatgtaagaattatccaatcagggacactgtgctggaaaccgtccaatcaggcacacagctgtagcgaacagcacggcttccgggtttggcggggcctttgtgtctctctgcagcctgagctccaggtctcttcttcactgctctgtgtcctctgcccctagaggcccagcctctgtggccctgtgtcctgtaggtattaggagatccacagctaggacgccgggatcccggaagcccggaaatggtaagaatgccggtccgacatcccgagagagggggaggggctggttggaaccggaaggaaatgtctttggcaagactcagctccagtcagtcagctccacaatttgtgccccgagttctccttacccagctcggcctcagtcctgttcagccataagatggcggctacacagaagcctggccccctgggcgtcctctcttccgtgcgcaatgactgtgtcctggcctggagccctctgtgggcagctctgcatctgcagcgctgtgtctctcccagattgtacagggatcatgagagggtcgtcaagggagaatcctgacttggggttcaggttcatgaatgggaagagctttggtccgtggggttcacagtttctcttttctcctattaaaaatgtatggggccaggagtggtggttcatgcctgtaatcccagcactttgggaggccgaggcgggcggatcacttgaggtaaagagttattagaacaagtaagttcctcttcaaagactcaacttctttgtcataagttgtaaatcaaatttatccctgctttccccttctccttttgttgcaaattgctcgtttaccctatttggaaaaagctggggtctaagccaaccgggatcagcttagattattgggtctgacccaagccaatagaggaaggacacaaaaacaggaactgtgttagggttaataaccccttcctggctgggtgcggtggctcatgcctgtaatcccagcaatttgggaggctgaagcgggctgatcacgtggtcaatgtaaggctcttgtattggtttgaaccgtgagagcgtgccaacagacaacaccaggcagtgtggagcaacatgctgttttagtgagtgccagggtgcaggccggctgaggcctacaatggcgtcagcaccaaatgaggacgaggcaggagttttattgtctccagtaaacaggaagtctcccagtctgatggggctgctacgtagtacccagacagcctctttctcaaacttcagggttacatgtcttctggccagagttgatgtcttccagacggttctcttcctgcttctgctatcttgctggcacacactgctgatgcaggtaggcttgcgccttgggactgggcctgggaagggaggagttactcatcccttcaagctttcagaccccggggagattctttctttcctctctttttggttatagaaagaaagggaaaaggggtgactttctcaataactacttcaggtgtgacatagggggtggcattggaaccttggaaaaaggtgcgtggctgggtttagatgggagctggttaatttttggggtattcttgagagacgggttggtgtccatcgtgttgttgaagcagaagcatcatctggattgtctggcagttaactgtagtttcaacgagagttttaatggcttttattattagtgggataacacaggcgagaaacaggaggaacctaatgataaaggtaactgtccctaccagccttttaaatcctcctaaatgaaagaaccaccctcctaggaggtttgttgggccacatcccttccaggtttagactggtacatgggctacttttctcatgtttgaagtgatttctagaacaacttttctgttatcatctatgttaagacagcaattaggatattaaacttaccacagattccaccctttcctgctaataagtagcctagtgctggcctgttttgataaattgctgtgcgcatttgattttgttgttgtgtgaacatttccaaggctgagaccgtttggttagtgattatctttagaacagcctgtaattattctatttagcatatatatgggagtgcgataacctcatgaaccatcctctgcctaaatggcagggccataatattcgatgatccattgcagaggccactcgtcttcttgcacagggactccaagggtgtcacctgctgttaatgttttggaggaaggagtagccttggagatgagcttgaccctggtgtgatggatccagtgggggagttcttggactctcactacagttggcatgctgagtatgacagtgtaagggcctgtccactttggttgtaccttttggtgagggctgggttggcagataaacatgtctatgcctgcaaggcagttatgttgagaggacaaggaggtgctgacagggagaggcatggcctcatttgctgcttcacgaatgaaagactgtgttggattaagtaggggaggtaattcctgagtggctcggagtctggtaaggatggaggccttaagacaaaagtatggctatgtatgattttgaagggagtataaaaagagggtgcttttggtgttgtgtggagtctcatgagggtgaaagggagatttcttgtccacaactgacaggtttctagagctagcttggtgagttgggttttaaggacagagttgactttttaaactttgcctgaagattgaggcctgtagggtgtatggggaacctatttgattcttaaggatgtagagacaccttgggtaatttggctgataaaggtgagcctgttatcatactggatggatgttgggagtccgaaacggggaattatatgcatgatgagagtttgtgtgatgacatttgcaccttctgaagttgttgggaatgcttctacctacccggagaaagtacagacaaagactggaagatagcggagccgtttatcgggcagcatgtgagtgaagtttacttgccaatcttgcctgggtaccttgccctgggcttggtgggtaggaaaaggtggtggccagggtaagccttggggtgacactaagtggcatatagagcaggacagggtgattccttgaacacagcaggaaagatgaggacaagtgagaatagggtggagaaattgagggagaagtttgtaactgacatggaaagagttgtggagactttggaggatagggattgtttgagattgaggaaggatgaagcacccttccttgacataccatggtccttgcttttgaaggtttttggcctggaagtcctctttttctttggaggagtgaaaaggagggaatgaggacagggacagagcatggctgggtttagatgcgagctgttagcacagtgatgtggggagtttctatgaatagagcatacagttggaggagcagtggggcagagatgagacttagtacactggggtgagctagcatgtctttgatgttatgggttgaataaactgttaggttggcatggagagatagttttaggctttcaagggtgagaacagcagctgccgtcaaggctcagagacaggcaggtcatccaagaactgtggcttcaagctgtttagagagttaggcaacatcctggagggtgggtcccttatactgggttagaacacctagtgcaactctacgctgttcgtcggtatagagggagaaaggtttggtaaggtctgcgtctgggagaacgaggataggggctgagttgagagccttttggagtagacagaaaggttgggtaataggctgtgcagggtttaaaggctcatggagagggcctttagtggcttggtataacggattggcaagtagagcgaaggaggaaacctagagactaaaatatcccgctagtcctagaaaagagaatttcttgctagtttgtggaggcgggagggactggaggagggatatgtggttggttgtgagccttcggtttcgtggggtaagagctaggcctagataggtgactgagggggtgcatatttgagttttaggggagacctgatacccccattctgccaagaagtttaaaagaaagatagtatgggcgttgcagtctctttgagaggggctacacaagagcagatcattagcatattgaaggggagtggatggtgttaggaataaggtacagaggttgcaagccagggcctgcccaaaaaggtggggactgtctctgaaaccctgaggttactacttcaagggtaggtgggcacagcctggtgggcttacctgagggggcatggcctggtgggcttatctgggtatgcaccaggtgaaaggtgggtgtcggggttttcctacgtaaaggcaaagaggtcctgagaatcagggtgtgaaggaattgtgaaaaaaagcattatttagtttaggacagaaaaatgggtgatattgtagggaaccacggaaagtaaagtgtatgggttagaaactactggacatactgggagtacagcttggttaataagcctagggcctggactaagtgataagttccatgtagctttttaacaggtagaatcagtgtgaaaaggggagtttgttgggcagagtaggtgattggcgaggaggcgagaaatgatagggtttaggcctacaagagctgcttgggggttggatactgcttctgtgataggaactgggtggggtttttaagggtaatgtgaacgggggcgtggtgttctgtcactgagggtgtggaagtatcctaaacagtgaggttaactatggatggggaataaggaaaggctgcatgttttaaggtgggaggttggaggagaagaagaaaattagaagcccccgaggggtctgggtagatgcgttgggtactatggggaatgtggaggtggagagtagtgtggagttttgagaggatgtctctactttggaggggagttgggcatgagggcaggactaagaaagagtgagtaaggaaaaggtgtgcagggaccagaaaagtggaggagtggctcatggtttggacacttgtccatcaattcctacaacagactgggaggactgggaaattaggtaaagcagagtaggttgccccagtattaattttaaaaaacatactggcctacctgccaccatcagtgttacccttggctcagatgaagatatggtagttgctgggatgccctttccagggcaccatcagtcttcagcagcaaggctggtgagatccaagtaggaggttttggctggctcaggaagggatgagggcagtgcttctgggggacgctcacagtctgacttccagtggagtcctccatagagggggcacgaactggtgggcttacctgggtttgggcattgtctggaccagtggccttcattgccacacttgaaatgtgcaggtgcaggtggattcctaggggcttccatgtggagctgtggccccatgggcctgcagggcccctgatggcggaggcaagcatttgaaactctgcctgtttttgccttttactttcctcatcatgattgttaaagactttgaaggctaaattaagatctttttgtggggtttgtgggctgttaccaagcttctggcttctgaagcttgtgctgaatatcaggggtggattgggaaatgaactgaaggtttaaaatagtggttccttctgagctggttgagtctacgttgttatattttctcatggcttcaggtaaacaagagggagaaaaagggctgggttttcatcaggacattgggtgatttctgaaagtttttcatagttgactgctttatgggcaccttttgagtcctgcaaggagacacacaatcatgtggtcttgatagtggcatccagggtccctgtcttgataatcctagtgggggtcctggttggggactgcctctgtaccagtagctgggcaagagcctggtgattaattgtattagcatgtgcctgagctagggtccagatagtctcagtcttctggggtgagagttgaagagaggataatgtagaggtcatgccaagttagttcataagactgggtaaggtactgaaattccctaaaataagaggtagggtcttttggaaatgaaccaaatcttttgttaatttgagagagatcagtgagggagaagggagcatgaactctcacaataccttcagctcctgctacttcccaaagggggcactctagcaccgacactgaagtaagggtggggcatgggccaaagatggcacctgagtgagtatggatgggagagaaggaagaagtcggaagtggttcctactgaccatttgaagggagaaggggggttgagttgataggcagtggaggatagataggggtgtaaggtggttggatgggtttacaggcctcaagagagggcggtgggggaggagactgggtacaggcaatactagaattgtcctgaggaggggacgatgtaggaaaagaagtggatactgctgactgggaagatggcagctgagaatataaagaggaggcttggggggttatagaagacagttgagagggagaggtaggggctgtgaggggtggacagcagtctgctggatccagtaagaaaaaagacgtagggttgggaggagaaaggtgatcaggtcggtgagaatggagaagtatttgaacaagtgagcaagaattgcagaggtcttgttgtgatctgagtgcaaaaaggcctggacataaggcatttctgcccatttttccagcagtcagcaataattgctttaatcagttaaaattgtaaagtcgaatgttccatttgtgggccatttggacccattatccaattcataatgtggccagactgaattgcaaaaaaagacaaggtgcttagggcagatatcttgcctgaggcctaaggtttgcaggttttttacaaggcagcctagaaggctgtccttcagaatggaaaactgggaattttctataatggagggtaggcactagagaacagagaaaaggagaccgtcctggatagccggatggagacaataaaaggagcagttgtcatcactgcctttttcattcctggaacgggatcagatggcttagaggggttcccctaaggccagatgatcagctagtgcctgacacatgccagagccttcttggaccaacattggatttttggacacaagaaccaagagaggccatacagatttttccctgttaagcgggctcccacagaaagctaccagtaggtgagatcactgactgatgtgcatgtacagagaggcaactggaggctgaggagcttcttttgtccagctgctgtggcctgctctccagggcagaggggtaggtccatggggatgcagacatcagctctcctgggttttggcaccaaaatgtaaggttcttgtattggtttgaaccctgagagcacactaacagacaacatgaggcagtgtggagacacatggtgttttaatgagtgcctggttgcaggcgggctgaggcctaaaatggccccagcaccaaataaggatgggtcagggatttcatggtctcctgtaaatcagaagtggcccagtctgacatggctgctatatagtacctggacggcctctttcttgatcttcaggagtacgtgtcttctggccagggtgggtgtcttctggccatctctctttctactactgctatcttgctggtgcacactgctgatgcaagtagccttgtaccttgggactgggcctgagaagggagttactcatcccttcaagctttcaggccccggggagaatctatcagtcaagagttctagaccagcctggacaacatggtgaaacccgtctctactaaaaatacaaacattagtggggcgtggtggcaagagcctctaatcccagctacttaagaggctgaggcacaagaattccttgaacccgggaggtggaggttgcagtgagctgagatcctgccatcacactccagcctatgtgaaagagccagactcattctcaaaaaaaaaaaaaaaagaaaaaagaaaaaaaaaaggtaagcatcttaaaatttcctttgtttatttaaacactgtgagtaatttcactggatttttcaaacacttagtttcaaacacgaagtgaataactctgacatggaaattaaagcttgaacctagtgattccaagctaagactaatactaagcctacaacaggaggtttttgttgttgttattgttgtttttgagacagagattcgctcttgttgcccaggctggagtacaatggcacgatcttggctcactgcaccttccggttcaagtgattctcctacctcagcctcaagagtaactgggattacaggcatgtgccatcacacccagctaatttggtatgtttagtacagacggggtttctccatgttagtcaggctggtgtccaactcacaacctcaggtaatttgcctgcctcagcctcccaaagtgctgggattacaggcctgagccaccgcgcctggctaacagtaagttattaaaggcctactgtttttttctggggagcctcccctgcagatgtcccagcctgcgcatcctagcaatggaaggagcctttatcctgagagaagctacagagtcctggaaagctggggccccacagcttgatgcagttaagatgaagacgaaaggaaactgggaggttctaactgataatgaagttattgttttgaggcattttttagactttgtaaaataacaacgtcagatttatgttaaaaaaaaaaaacgaattccaaaatgtattgcaacaggaggaagtatcaactaactataaggcctttatggcttgcaaaaatgtaggcagaaaagggctttctttcctagggaggagcaaacaatattggaaaggaggtgggaggggaatggcaaatggagggtgaaaaagtcagattttagatcagagaatgtcataccctgaaatcagcatgttcttagtagggacataaaatggggttgtatgttgacacagactgagagtagctcaaagttcaggagcctgagggagaaagataaacttaagtaaagtttgattaagaaatattttattttaggctgagctcaatggctcacgcctgtaatcctagcactttgagaggcagaggcaggtggatcacctgaagtcaggagttcaagacctggctaacatggtgaaaccctgtgtctaccaaaaatacaaaaattagctgggtgtcattgcagtcatctgtaatgccagctacttgggaggctgaggaaggagaattgcttgaacccagaaggcagaagttgaagtgagccgaggttgagccactgcactcctgcctgggtgacacagcgagactccatctcaaaaaaaaaagaaaagaaaagaaaagaaaatgcttatttaagtgggatggcatttattaaccagaaagttctgaaaaaaattattaggagataccagctctctacggtgctgaatgaagtctacttaaaattactactaaggtgattccgttccaagatggccaaatagggacagctctggtctacagctcccagtgtgattgacacagaagatgggtgatttctgcatttctaactgaggtacctggttcatctcattgggactggttggacagtgggtgcagcccatggaggcagagccaaagcagagtggggcattgcctcacccagaagcacaaggggtcaggtgatttccctttcctagccaaggaaagccatactttcaccaaagacagtgcctgaaaaaataggaaacttccacccaaatactgtgcttttccaatggtcctagcaaatggcacacaaagagattatatcccatgactttcttggtgggtcccatgcccacagacccttgttcactgctagtgcagcagtctgagatcaacctgcaaggcagcagcctggcagggggaggggcgtctgccactgctgaggcttgagtaggtaaacaaagcagtcaggaagcttgaactgggcggagtccaccacagctcagcaaggcctctgtctctgtagactccatctctgggggcagggcatagctaaaccaaaggcagcaaaaacttctgcagacttaaacatccctgtctgacagctctaaggagagcagtggttctcccagcacagtgtttgagcttggagaacatacagactgcctcctcaagtgggtcactaacccccgtgtagcttaactgggagacatctcccagtaggggctgactgacagctcatacagccaggtacccctctgggatgaagcttccagaggaaggatcaggcagcaacatttgctgttctgcaatatttgctgttctgcagcctccactggtgatacccaggcaaacagggtctggagtggacctccagcaaactccagtagacctgcagctgagggagctgactgttagaaggaaaactaacaaacagaaagaaatagcatcaacgttaacaaaaaggacatccacaccaaatcccatatgtaggtcaccaacatcaaacaccaaaagtagattaagccaaaaagatggggagaaaccagatcagaaaagctgaaaattctaaaaaccagagtgcctcttctcctccaaaggatcgcagctcctcgccagcaatggaacaaagctggatagagaatgactttgaagagctgacagaagtaggcttcagaatattggtagtaacaaacttctctgagctaaaggaggatgtttgaacctatcacaaggaagctcaataccttgaaaaaagattagacaaatggctatctagaataaacagtgtaggaaggagcttaagtgacctgatggagctgaaaaccatggcacaagaactacatgacacatgcacaagcttcaatagctgattcaatcaagtggaagaatgggtatcagtgattgaagatcaaattaattaaataaagtgagaagagaagtttagagaaaaaagagtaaaaagaaatgaacaaagcctcccagaaatatgggactacgtgaaaagaccaattctacgtttgattcatgtacctgaaagtgacggggagaatggaacgaggtagaaaacactctccaggatattaaccaggagaacttccccaacctatcaaggcaggccaatattcaaattcaggaaatacagagaacaccacaaagatactcctcaagaagagcaaccccaagacacaaaattgtcaggttcaccaaaattgaaatgaaggaaaaaatgctaagggcagccagagagaaaggtccggttacccacagactgaagcccaacagactaacagcagatctcttggcagaaatgcgacaagtcagaagagagtgggggccaatattcaacattcttaaagaaaataattttcaacccagaattcatatccagccaaactaagattcataagtgaaggagaaataaaatcctttacagacaagcaaatgctgagagattttgtctccaccaggcctgccttacaagagctcctgaaggaagcactaaacatggaaaggaaccaccagttccagccaccacaaaaacatgctaaattgtaaagaccattgatgctaggaagaaagcccatcaactaacaagcaaaataaccagctaacatcataatgacaggatcaaattcacacataacaatattaaccttaaatgtaaatgagctaaatgccccagttaaaagacacagactggcaaattggataaagagtcaagacccatctgtgtgctgtattcaggagactcatctcatgtgcagggacacacataggttcaaaacaaagggatggaggaagatctaccaagcaaatggaaaggaaaaaaaaaaaacagtggttgcaatcctggtctctgataaagcagactttaaaccaacaaagatcaaaagagacaaagaaggccattacctaatggtaaagggatcaattcagtaagaagagctaactatcctaaatatatatgcacccaatacaggagcacccagattcataaagccagtctttagagaagtacaaagagatttagactcccacacaataaaaatgggagactttttagacagatcaatgagacagaaggttaacaaggatatccaggacttaaactcagctctgcaccaagcagacctcacagacatctacagaactctccaccacaaatcaacagaatatacattcttctcagcaccccatcacacttattctaaaattgaccatatagttggaagtaaagcactcctcagcaaatgtaaaagaacagaaatcacaacaaacagtcttgcagaccacactgaaatcaaattagaactcaggattaagaaacttactcaaaactgcacaactacatggaaactgaacaacctgctcctgaatgactactgggtaaataacgaaatgaaggcagaaataaagatgttctttgaaaccaatgagaacaaagacacaatgtaccaaaatctctgggacacatttaaagcactgtgtagagggaaatttatagcactaaatgccaacaagaggaagcagcaaatatctaaaatcaacaccctaacatcacaatagaactagagaagcaagagcaatacgcattcaaaagctagcagaaggcaagaaataactaagatcagagcagaactgaaggagatagagacacaaaaaaccctttaaaaaatcaatgaatccaggagctggttttttgaaaagatcaacaagatggatagaccactagcaagactaataaagaagaaaagagagaataatcaaataggtgcaataaaaaatgatgaaggggatatcaccaccaatcctgcagaaatacaaactaccatcagagaatactataaacacctctatgcaaacaaacttgaaaatctagaagaaatgagtaaattcctggacacatacaccctcctaagattaaacaaggaagaagatgaatctctggatagaccaataacaggctctgaaattaaggcaataattaatagcttaccatctaaaaaaagtccaggaccagacagattcacagctggtttctatgaggaggagctggtaccattccttctgaaactattccaatcaatagaaaaaaaaggaatcctccctaactcattttatgaggccaacagcatcctgataccaaagcctggcagagacacaacaaaaaaaggagaattttagaccaatatcactgatgaacatcagtgcaaaaaacctcaataaaatactggcaaactgaatccagcagcacatcaaaaagcttatccaccacaatcatgttggtttcatccctggaatgcagggctggttcaacatacacaaatcaataaacataatccatcacatacacagaaccaaagacaaaaaaaccacatgattatctcaatagatgcagaaaaggcctttgacaaaattcaacaaccttcatgctaaaaactctcaataaactaggtattgatgtaacatatctcaaaataaaaagaggtatttatgacaaacccacagccaatatcatactgaatgggaaaaaagtggaagcattccctctgaaaacttgcacaagacagggatgcccactgtcaccacttctattcaacatagtgttggaagttctggccagggcaatcaggcaagagaaagaaataaaggtattcaattaggaaaagaggaagttaaactgtccctatttgcagatgacaaaattgtatatttagaaaatgccatcgtctcagcccaaaatctccttaagctgataatcagcttcagcaaagtctcaggatacaaaatcaatgtgcaaaaatcacaagcattcctatacaccaataacagacaatcagagagccaaatcatgagtgaactcccattcacaattgctagagagaatcaaatacttaggaatccaacttaaaagggatgtgaaggacctcttcaaggagatctacaaaccactgctcaatgaaataaaagaggacataaacaaatggaagatcattccatgctcattgataggaagaatcaatatcatgaaaatggccagactgcccaaggtaatttatagattcaatgccatccttatcaagctaccaatcattttcttcacagaattggaaaaaaactactttaaagtatatatggaaccaaaaaagaccccacattgccaagataatcctaagcaaaaagaacaaacatggaggcattatgctacctgactttatactatactacaaggctagagtaaccaaaacaccatggtactggtgacaaaacagatatatagaccattggaacagaacagaggcctcagaaataacaccacacatctacaactatctgatctttgacaaagctgacaaaaacaagatatggggaaaaaattccttatttaataaatagtgttgggaaaactggctagccatatgtagaaagttgaaactggatcccttccttacaccttacacaaaaactaactcaagatggattaacgacttaaatgttagacctaaaaccataaaaaccctagaaggaaacctaggcagtaccattcaggacataggcatgtgcaaggacttcatgactaaaacaccaaagcaatggcaacaaaggcaaaaatagagaaatgggatctaattaactaaagatcttctgcacagcaaaagaactaccatcagagtgaagaggcaactttcagaatgaaaaaaaatttttgcaatgtacccatctgacaaagagctagtatccagaatctacaaagaacttaaacatatttagaagaaaaaaaacctcattaaaattgggcaaataatatgaacagacacttctcaaaagaagacattcatgcagccaacagacatatgaaaaaaatggtcatcattaccggtcattagataaatgcaaatcaaaaccacagtgagataccatctcacaacagttagaatggcgatcattaaaaagtcaggagacaacagatgctggagaggttgtggagaaataggaatgattttagactgttggtggaagtgtaaactagttcaaccattgtggaagacaatgtggtgattcctcaaggatctagaacaagaaataccatttgacccagtgatcccattactgggtatatacccaaaggattataaatcatgctactataaagacacgtgcacatgtatgtttattgcagcactattcacaatagcaaagacttggaaccaactcaaatatccatcaatgatagactggattaagaaaatgtggcacatatacaccatggaatactatgcagccataaaaaatgagttcatgtcctctgcagggacatagatgcagctggaaaccatcattctgagcaaactgtcacaagaacagaaaaccaaacaccacatgttctcactcataggtgggaattgaacaatgagaacagttagacacagggtggggaacatcacaccctggggtctgtcatggggtggggtgcagggggagggatagcattaggagaaatacctaatgtaaatgatgagttaatgggtgcagcaaaccaacatggcacatgtatacctatgtaacaaacctgcacattgtgcacatgtaccctagaacttaaagtataataataaaaaataaaaaaaagtactactaaaaattatggaacataggagttatctgtacattgaagtttgcataaaacatgtttctttaaggttaaattcagattttatttactttgtgttggaggaatatttcaacagtgatgctgtgttcttctgtgtgcattagcacatcataaaaatttgtccagtgcagttaatggttaatgattcacttgcttaaatagctctctgacagattttttcactcttcagttaattatttttctcttcattattaagtatctttatgcagctgatgtgtataaaacgctatacttaatctggcagctgcccttttttcttattttttcttcatatttttctttggaaaatgaaggcttttatctttgtttacaggtgagaaaaacttggaaaacccaggcttttccacttactggatgtgttacaaaatatccttcttgggccaaaaacatagacagtattgctgagcttgttagaaattaaaaaaatcagactttatgtcggatcttctggaaaaaaaaaaaaagaaaaaaacctgtataacaaggtcttgaacttattgtacatatcaaaatttcagaggtgtcttgtagctcaatatgtctttttccatctgaaaaatatgcacaactcattcagtatgatgtaaatatagcactgaaaagtgtgtatgttgatgttcatgctcttaattttatactttgttagctacaataacatcatatatgaactgatgtggatcttatgctgttctttttttctcagagttaaaaaatacattagagaatatttctttgttggagattattttcttggataatttaattctataagtaagaaccagttccttttactttccaatttcaccttcagtcaaaataaaaactctgcccatggccacttggtaaaaatgtgtgtgtgtgagtgtgtgtttgtttcaggggccattgcaatttagagatgtgcttacagaattatctctggaggagtggcattgcctggatactttacagcaaaatttacatagcgatgtggtgttagagaacaacataaacctggtctttcttggtgaggataactttaatacataattcataatatactctaaaggttttctttctcttttttgtggaatgttttttagtaatgtattcattgatcaaagagtttcagaacccattttccagaaaatctttagaaatttttcatttagaaaagaatttgttcaagatgttttgtgttaatcaaaactttacacattcctgagttgagctatattcttcactctaaattagtgataattccagaaatttggtggcataaaatattgttgtccccacctgaaaatctaattatcagcaacaagttttgattctgtagtaccaggtagtaaaattaaaaaacctacaagtaggctgggcgcggtggcttatgcctataatcccagcacttcaggaggctgaggcaggaagatcatgagatcaggaattcgagaccagtctgaccaacatggagaaattccatttctaataaaaatacacaattagccgggcatggtggcacatgaatgaaatcccagctaccctggagactgaggcaggagaattggttgaacccagaaggcagaggtttcactgagccaagatcgtgccattgcacttcaacctgggcaataagggggaaactctgtctcaaaaagaaaagaaaagaaaagaaaaactgatgaattcaaagtgttttctgggagccaagatggccaaataggaacagctccagtctacagctctcagcatgagtgacacagaacacgggtgatttctgcatttccaactgaggtaccaggttcatctcactggggagtgccagagagtgggtgcaggatactgggtgcactgcaccgtgtgtgagccaaagcagggtaaggcatcccctcacccaggaagtgcaaggggtcagggaatttcctttcctagtcaaagaaaggggtgacagacagcacctggaaaatcgggtcactcccaccctaatactgtgcttttccaatgagcttaacaaacggcacaccaggagattatatcccacacatggctcagagggtcctacgcccatggagccttgctcattgctggcacagcagtctgagatcaaactgcaaggcagcagagaggctgggggaggtacgcccaccattgctcaggcttgagtaggtaaacaaagctgccagaagcttgaactgggtggagcccacctcagctcaaggaggcctgcctgcctctgtaggctccacctctgggggcagggcacagacaaaagaccgcagtaacctctgcagacttaaatgtctttgtctgacagctttaaagagagtagtggttctcccagcacgccgcttgagatctgagaatgggcagactgcctcctgaagtgggtccctgacccctgagtagcctaactgggaggcatctcccagtaggggtggactgacacctcacatggccgggtactcctctgagacaaaacttccagaggaacaatcaggcagaagcatttgtggttcaccaatatccactgttctgcaaccactgctgctgatacccaggcaaacagggtctggagtggacgtccagtaaactccaacagacctgcagctgagggtcctgactgttagaaggaaaactaacaaacagaaaggacatccacaccaaaaacccatctgtacgtcaccatcatcaaagaccaaaggtagataaaatcacaaagatggggaaaaaacagagcagaaaaactggaaactctaaaaatcagagtgcctctcctcctccaaaggaacgcagctcctcatcagcaatggaacaaagctgagcggagaatgactttgacgagttgagagatcaaggcttcagaagatcaaactactccaagctaaaggaggaagttcgaaccaatggcaaagaagttaaaaaatttgaaaaaagaattagactaatggataactagaataacccatgcagagaagtccttaaaggacctgatggatctgaaaaccatggcatgagaactacgtgatgaatgcacaagcctcagtaaccgatgcgatcaactggaagaaagggtgtcagtgatggaagacgaaatgaatgaaatgaagcatgaagagaagtccttaaaggacctgatggatctgaaaaccatggcacgagaactacgtgatgaatgcacaagcctcagtaaccgatgcgatcaactggaagaaagggtgtcagtgatggaagacgaaatgaatgaaatgaagcatgaagagaagtttagagaaaaaagaataaaaggaaatgaacaaagcccctaagaaatatgggactatgtggaaagaccaaatctatgtctaattggtgtacctgaaagtgacggggagaatggaaccaagttggaaaacactctgcaggatattatacaggagaacttccccaatctagcaaggcaggccaacattcaaattcaggaaatacagagaacgccacaaagatactccttgagaagagcaattccaagacacataattgtcagattcaccaaagttgaaatgatggaaaaaatgttaagggcatcccaagagaaaggtgggttacccacaaaaagaagcccatcagactaacagctgatctctctgcagaaactctgcaagccagaagagagtgggggccaatattcaacattcttaaagaaaagaattttcaacccagaatttcatatccagccaaactaagtttcataagtgaaggagaaataaaatactttacagacaagcaaatgctgagagattttgtcaccaccaggcctgccctaaaagagctcctgaaggaagcactaaacatggaaaggaacaaccagtaccagccactgcaaaaacatgccgaattataaagatcatcaagactaggaagaaactgcatcaactaatgagcaaaataaccagctaacatcataatgacaggatcaaattcacacataacaatactaatcttaaatgcaaatgggctaaatgctccaattaaaaggcacagactgacaaattggataaagagtcaagacccatcagtgtgctgtattgaggaaacccatctcatgtgcagagacacacatgggcttaaaataaagggatggaggaagatctgccaagcaaatggaaaacaaaaaaaggaaggggttgcaatcctagtctctgataaaacaggctttaaaccaacaaagatcaaaagagacaaagaaggccattacataatggtaaagggatcaattcaacaagaagaactaactgtcctaaatatatgtgcacccaatataggagcacccagattcataaagcaagtccttagtgacctgcaaagtgacttagactcccacacaataataatgggagactttaacaccccactgtcaacattagacagatcaacgagacagaaagttaacaaggatatccaggaattgaacacagctctgcaccaggcagacctaatagacatctacagaactctccaccccacatcaacagaatatacattcttttcagcaccacaccacacctattccaaaattgaccacatagttctatggaagtaaagcactcctcagcaaatgtaaaagaacagaaattataacaaactgtctctcagaccacggtgcaatcaaactagagctcaggattaagaaactcactcaaaaccgctcaactacatggaaactgaacaacctgctcctgaatgactactggctacataacgaaatgaaggcagaaataaagatgttctttgaaaccaacgagaacaaagacacaacataccagaatctctgggacacattcaaagcagtgtgtagagggaaatttatagcactaaatgcccacaagagaaagcaggaaagatctaaaattgacaccctaacatcacaattaaaagaactagagaagcaagagcaaacacattcaaaagctagcagaacgcaagaaataactaagatcagagcagaaccgaaggagatagagacacaaaaaaatccttcaaaaaaatcaatgaatcccagagctggttttttgaaaagatcaacaaaattgattgaccgctagcaagactaataaagaagaaaagagagaagaatcaaatagacgcaataaaaaatgacaaaggggatatcaccactgatcccacagaaatacaaactatcatcagagaatactataaacacctctatgcaaataaactagaaaatctagaagaaatggataaattcctggacacatactctctcccaagactaaatcaggaagaagttgaatctctgaatagaccaataacaggctctgaaattaaggcaataatcaatagcttaccaaccaaaaaaagtccagaaccagatggattcacagctgaattctaccagaggtacaaggaggaactggtaccattccttctgaaactattccaatcaatagaaaaagagggaatcctcccaaactcattttatgaggccagcatcatcctgttacaaaatcctggcagagacacaacaaaaaaagagaattttagaccagtattcttgaacattgatgcaaaaatcctcaataaaatactggcaaactgaatccagcagcacatcaaaaagcttatcctccatgatcaagtgggcttcatccctgggatgcaaggctggttcaacatatgaaaatcaacaaacgtaatccagcatataaacagaaccaaagacaaaaaccacatgattatctcaatagatacagaaaaggcctttgacaaaattcaacaatgcctcatgctaaaaactctcaataaattaggtattgatgggacgtatctcaaaataataagaggtatttatgacaaacccaaagccaacatcatactggatggacaaaaactggaagcattccctttgaaaacttgcacaagacaaggatgccctctgtcaccactcctattcaacatagtgttggaagttctggccagggcactcaggcaggagaaggaaataaagggcattcaattaggaaaagaggaagtcaaattgtccttgtttgcagatgacatgactgtatatttagaaaaccccatagtctcaccccaaaatctccttaaactgataagcaacttcagcaaagtctcaggatacaaaatcaatgtgcaaaaatcacaagcattcttatacaccaataacagtcaaacagagagccaaatcatgagtgaattcccattcacaattgcttcaaagagaataaaatacctaggaatccaccttacaagggatgtgaaggacctcttcaaggagcactacaaaccactgctcaatgaaataaaaagaggatacaaacaaatggaagaatattccatgctcatgggtaggaagaatcaatatcatgaaaatagccatactgcccaaggtaatttatagattcaatgccatccccatcaagctaccactgactttcttcacagaattggaaaaaactactttaaagttcatatggaaccaaaaaagagcccacattgccaattcaatcctaagccaaaagaacaaagctggagacattatgctacctgacttccaactatactacaaggctacagtaaccaaaacagcatggtactggtatcaaaacagagatatagaccattggaacagaacagagccctcagaaataatgctgcatatctacaactatctgatctttgacaaacctgacaaaaacaagcaatagggaaaggattccctatttaataaatggtgctggaaaaactggctagccatatgtagaaagctgaaactggatcctttccttacaccttatacaaaaattaattcaaggtggattaaagacttccacgttagacctaaaaccataaaaaccctagaagaaaacctaggcaataccattcatgacataggcatggacaaggatttcatgtctaaaacaccaaaagcaatggcaacaaaagccaaaattgacaaatgggatctaattaaactaaagagcttctgcacaacaaaagaaaccaccatcagagtggacaggcaacctaaagaatgggagaaattttttgcaacctactcatctgacaaagggctaatatccagaatctacaatgaactcaaacaaattcacaagaagaaaacaaaccccatcaacaagtgggcaaaggatatgaacagacacttctcaaaggaagacatttatgcagccaaaaaatacatgaaaaaatgctcatcatcactggccatcagagaaatgtaaatcaaaaccacagtgagataccatctcacgccagttagaatggcaatcattaaaaaggaaacaacaggtgctggagaggatgtggagaaataggaacacttttacactgttggttggacggtaaactagttcaaccattgtggaagtcagtgtgacaattcctcagggatctagaactagaaataccatttgacccagcaatcccattactgggtatatacccaaaggattataaatcatgctgctataaagacacaggcacacgtatgtttattgtggcactattcacaatagcaaggacttggaaccaactgaaatgtccatcaatgatggactggattaagaaaatgtggcacatatacaccatagaatactatgcagccataaaaaattatgagttcatgtgctttgtagggacacggatgaagctggaaactatcattctcagcaaactatcacaaggaccgaaaaccaaacactgcatgttctcactcataggtgggaattgaacaatgaggacacatggacataggaaggggaacatcacacactggggactgttgtggggtgggggaagggaggagggatagcattaggagatatacctaatgctaaatgacaagctaatgggtgcggcacaccaacatggcaaatgtatacatatgtaacaaacttgcaagttgtgtacatgtaccctaaaacttatagtataataataataacaataaaagtgttttctaaatatttagaaatttctgttttaacttagtatttttgtattaatttactagaatattttatcacaccctctcagctgagcacattactagcttgtaattggagaatatgagcaagattcatattatttatttatttatttttatttttttgagacagagtgtcactttgtcacccaggctagagtgcagtggtgcgatctgggctcactgtaagctccacctcccagattcatgccattctcctgcctcagcctcccgagtagctgggactacaggtgcctgccaccatgtgtggctgattttttgtattttttagtaggtacagggtttcactatgttagccaggatggtctcaatcttctgaccttgtgatccacccaccttggcctcccaaagtgctgggattagaggcgtgagccaccacacccggtctcatgttatttatttttaataaaacaggtattgttgtctccaagccagacctgatcatctgtctggagcaaggaaaaatcctttgagtatgaggagacatgagatgattgccaaacacccaggtgggtgcaagtgaaagtgaatacaacagacgacacaggtaagagatcccaaggtgaaagagaaagccagtacttaaaatgtgatttgggaagctgtgttccaaaggaaatagttcctgggcggttgttttataatttttctctcacaaagggacatctgctgtcttatgctttcaaattctctaaggattctacttttctttcagtgagcttccttcaagttcacagtgaaagccaaagtcttcttcatggcatataagacactgcacaatcttgctgcttttacattgttttgatgacacaaaattatctgcatgattttaagaaactaaaactattctcaaagttctctttttgcattttgaaatgtgcgagagtagtagtttctgttgaatttttttcattattctgcacatttccattctgtttttattactatatagtgttgaaatatagttggaaagtataagtatgatatccttctgctctgttcttttcatcaagattgctttggctaatcagtttattttagtttcatgtaaattttagaattgtatttttcattactgaaaaagacaccactgcaattttaataggaagtttattgaatctatagatcactttagataatatggaactctaataatatttattctttcaatccatagacataaaatactttataatttatttggaacttctctaatttctttcactgattttttttggtaaaggtttttcatttcattggttaatttttttctcagaaattatttaatgctataacaaataagatttttttgtcctatttttatcagatagtttgatttaagtgtataaaaccgtacatatacttgtatgttagtttcatattttgtaatttactgagtgtatttattagtttagataggatttaatgtactgtttattagtttttaaatataatattgtatgatctacaagcaaaaactttttagttttcttaaattttaatggatttttttttatttctttgagtaaatcttctgccacatacttccagtgttacactaaaatagaagcattcacaatgggcacaatatagttttgcattggtgtctgaatttgatggagcaaagacctattcaagttttcataaactgatttcagaaggtaaatatcttcttctgttggacccttagggtgatgagatgccctctgaatttgtagtgaagaagggttgtagcttggtcaccaggctgctgggtctgcattagggtccacctttagttggcttgttacaggggcttgggttgttataattcccattttatttttggacagactgaatatccttcagagctttgctccataaggcagacactagggcatgtttttgcaattggctctgcatatggtgggccttgtatcaggatgtggatgggtgtggctttcagtgagtaccagagagcatttcctcaggtaaccgtgtgggttactatataggcagaactgaccataaactgtggctcaggtaactgaaactgagtcatggaactgcctcagtgaccccagtaaaggccaaggtctgcatgcctggatgcatgactgtaaatgggcaccttcctccaagtctctggaatagcaggacctctgtcagactgtggctgggaggagtttgggatggttacagagtaagtttagaattctcaatggaaccaagttgggtgaaccctatcctggtctgtagctaaaacaggggtcctgtagtatcccacgtgagtgagggcctgccttctgaatagaacacttctcaaacataagctttaacagcatttcacaactgcatccctggatgtcaaatctctcttagaggtacttattttggagatggtgtcttgctacataacccaggctggtctcaaaatcctggcctgaactagttctccaaccttaacgtaccatgtagctgtcattacaggtgtaagccataatcctggttctctcataaaggcatttttgtcaggggtggctgactttttatgccataagggaatatgaaaatagggcacttttaatcttttcatcttactgatgtcactgtccttttacatttttactttttattttctatttcaaatttgtctataattttggattcagtcatttagcacatatgctagaatttgcatggtatacctgaagtaaatgagatattagtaggcaccccatatttactaaaatagttacttataaatttatgtttgctccgggcaaaaaggaattataggattttcgtctactattttcagcctatatctaaataataacatagttcatttcctaatatttgttttacatatcagaggatctaaccctattctacaaaatatatatatatttttctatatttaacaatggaaggttattatttgcttttaaagttggaatacagcagtttcattttgtgtaagaatagcatatatttaaaacaaaaagcaactctagtttcttttaaatgctaatttattaaaagtttgtcattggagtcttctatttataattatactgcatattttctgaaattttagtgccacacagtgcatgccaatgattcaaaatacaggtatatgatgattacatagtagcagttgaatatcacagttacctacacaatttttttttttttttttttttttttgagaaagagttacctctcttacccaggctggagtgcaatagtgtgatcttggctcactgcaaccttcatctcctgggttcaagcaattctcatgcctcagcctcccaagtagctgggattacagggatgtgccactatgcctggctaatttttgtatttttagtagattttgggtttcaccacattggctaggctgcttttaaactcctcacctcaggtaatctgcccccctctgcctcccaaagtgctgagattacaggcatgagccactgcacctgcctgacaatttttttttgatgatacatcaatgtggcataccagattttgtgagtaaatatttctcttattattgttttgaagttctgtgtatcaggggtcccgcccccaatatttcaatgtatgttctttctattttccataagtgtcagctggttgaaaaataaagagaaagagtacaaagagaggaattttacagctgggccaccaggggtgatatcacatatcggtaggaccacgatgcccacctgaaccttaaaaccagcaagtttttattaaggattttaaaaggggagggagtgtatgaacagggagtaggtcacgtgcttcaaggggcaaaaagcagaacaaagatcacatgcttctaaaacaggaccagagcaaaatcagaactcctgataagggtctatgttcagcagtgcacgtattgtcttaataaacatcttaacagaaaaaaagggttcgagagcagagaactggtctgaccaaaaatttaccagggtgtagtttcccaatcctagtaatcctgagggtactgcgggagaccagggcatatctcagtcattatctcaaccacataggacagacattcccagagtggccattcatagacctccccccaggaatgaattcctttcccagagtattaatatcagtattccttgctaggaaaagaatttagtgatatcttccctacttgcacacccatttataggctctctgcaagaagaaaaatatggctctttttgcccaaccccacaggcagtcagaccttatggttgtcttcccttgttccctaaaaatcgctgttattctgttttcaaggtgcactgattgcatattgttcaaacatacatgttttacaatcaatttgtacagttaacacaattatcatactggtcctgaggtgatgtacatcctcagctaatgaagataacaggattaagagattaaaataaagacaggcataagaaattatgaacatattatttgggaagtgatagatgtccatattaaaatgaaatcttcacaatttatgttcctctgctgcgactccagctggtccctctgtttggcatccctgacttcccacaatatctctccctttctttttatataaatgtaccaacatcgcatgcaatgttcaagagtcactagctgatctccaagccaaagtatagattgtcttaaatcattaatttgattagataatttttgatcaatgccttgttgagaattccacatttggttggaatttgcttgccaaagattaacaaaatgggccgtttgaatagattggtgtaatgccactccggcagtagtggccagtgcagtgactataaataggcccatgatcacagtgattaaagtgaaaacaaatctcttagattttttgagaattctttgtaacacttcattcattaaatgtactgagagggaagattcccagtgtctgggtaaagttaccgaatccagattccttctcgagctcgaagccacattacacttctcctggagtcaaaatgggagttaacacaagtgtataaatgacaattaatgcattggacagtttgtgtgtccaaattttgatatttcccactaacagcacgtaaggaggcttaacacaactttgtataggaatagtcaggctggaggtaaacaaagcagaacattgatactgagggagagtagaggtggtggcaacgcccaatgttgtctgccataaagaagcaatccgaggtgcccagggatgctgaggaagtagaggggcatacctgggtcaagaagaattatcataatgccaattggagtcccataaaggaggatcagcatcaaaaagaggaaaagggttcaaaggggatttatcatggggttcagagtcatggatgcaaggggcagtagtggggataacagacagaaaagtttacccttcccatactcacagtccagacatggcaatagccaatttccaaagttctgagtgttccaggctcagaatggggaatatcatatgaggcctcggaggggtaatgcccttatcttcccattttaagggaaagaatgagctgaacttcctatgtaaagtagaacgatgatcctcgtcctcccaataagaaataaaataagtagcctccaggcattcccttccaccagaggagcaattgttttttaaatagccctttggtgcccatcctattactaaaccatatgcgtcattttttagtactactacatgtgagttaacacagtcttcccaaattaaaattttagatgggccctcaaaatttttaggacatggttttcctacaggtttatattgaaagtttggggtatctcctattactccccctttcatttgtcttaaaggagaaagagagaggctggagatcaaatgtccctgttctcttgtagctaatctctccggaagataagcagcccagatttgagcttgtagatgaatacaaccatctacatgtgcatgtccaaggcacagaggagggtatttataacccatggtaacattaaattcagtgctttcttctcctggttgagtggggcaatggtcatctgtagctccatgtatccacacactatcattagtatagatttctgcaggagcattcatccaggtgagaggtcgaataagtggaagaaaaggcacataagcccaataagaataattttgtgtagcaggtaaatcattttgaggggaaactgatgagacagaaagtttaagaagaattattaaataaaacctattgtaagcaagatcctgtgctgaaggaggaagagaagaacagagggatgttattttcaggctaatagaaatggtgagatttttaggtttagaagtggcattaattagaggggtctccgttgccattagggaggattgaaccagacccattttgatttggcatgccagtttttgagaagtcggcagagatctcaccaggtatgaaggcggtctctgacttggatgtcttttccctgtggctttctttgtcactattcacacgaagtttgagtctctcagtgggcacccagacaggggattgatctcctggtgaaacacaagcataccctcttccccatgttataattgttccaggttcccaggtattggtttgggagtttttccgtaacactggcttgccttcatttagggagaattttttgcctgtataatggcattcagctgcagtcagagttgtctttaggaacatttagaaagtttaaagtaaacaatgctaaatgtaattgggagtggggagtggttaaattatgcttttgttgctcagactgtttggacaattgagtttttaaagtgcaattggcctgttccaccacagtctgtccctgaggattgtaagggattccggtagtatgggaaattccccttgttgcataaataaatcaaaagacttacatatccaggggtgttgtctgtttttatctgacatggaagccccataactacaaagcaagaatacttatgtcttttaacatgggcagtgccttcccctgtttggcaagtagcccagataaagcctgaaaagatgtctacagaaacatgcatatatgaaagtctgccaaaggagctaacatgagtcacatgcatttgccataagtcattaggagttaggcctctgggattaatgccagattcctgatttggaagtacaaaaacttggcactgagggcagcagtggataataagcttagcctctttccaggtgagagcaaatttatattttaatccagtagcattgacatgagtgagattatggaactctgagcttcttggtttgcaaaagagaccggtcaaccttttgattaccagcaggcatgggtcccagtaaagtggtatgagatctgatatgtgtagtatagaaagggtgtctacactggcgaaccacctgttgtaaacttgaaaataaaaaaagccaattcagaattatcaatatgtttgatagtagcgatttctatatttttagtggcatgtacaacataaacagaatcagagacaatatttaacagtttggggaaatcctgtaaggcaataattacagcaattaactctgccttttgagcagatgtgtgaggcgtagaaataagcttgtctgcaggacacagataaccagcatttccgttactggagccatcagtgaacactgtaacagcctcaggaatgggctgatctttggtctattgagggaccacccaataagtcatttttataaaatcaaacaatttttttgataatgattgacaataacacagataaaatcagtcaagtgaatttgccacagtatggaatgttgaaaagcagcctgaactttaagccgatttaaaggaaccacaatagatttggatcaaatccagaaattttaagtgatctacaccaagcttgtccaattagattggctatttggtccagataaacagacaaagtttttgacacagaatgaggaagaaaacaccactccactaaatcattatgttgaacaattagcccagtaggggagtgcaatgaagcaaaaaccagaagctgaaaaggctgagatggctgtaccctagacaacagggcagtttggattctttcttccatgaattaccgttccagtgaagcctcaggggtcaaagtcctgagactgtggagattggaatctccacacagtatagaaaacaagttagacagtgcatattttggaatgcctaaggtagatcttaaataattaatgttacccaaaagtttttggaaatcatttaaggttttcaaagaatctctcttaatctgaactttttgaggttgaatatattctttattgaccaccattcctaaatattgagcaggagtggtcttttgaattttatcttgagtgatgtgtaatccagcctcagtgacatggtggctcaaaaattgataacagtcaattaattctttatcagtgggggcagcaattaatatatcatcaatataatgaagaatataggcctggggaaattgagctcacactggtgaaagcacccatccaacataaagctggcagatggtagggctattcagcattccctgaggaagtactctccattgataatgagctacaggctcctgattattgatagatggtacagtaaaggcaaatttttcacaatccaatttatgtaaagcaataaaaatactttaagatcaataactatgagaggaaattcttaggtattaaagcaggggcaggcatgccaggttggatggctcccataggtttaattacagcattaatggaccttaaatcagttaccatccaccacttgcctgatttcttttttactagaaacacaggagaactccagggggaaagagaagattccacatttccaagttgtaactgttcagaaaccaattgagttgaagcctccagttttttttagagagtggccactgatcaatccaaacaggtgttttagattttcattgtaaaggaataggattaggaggcatggcagtggccgccattaaaaaggagaacctaaaccagcgctgtcttcttttacagtaacttgaagaggtttagcaattccttcatgttttggactgaaaccgagtctgggaacaaaccccatgttttccattatatgttgactgggagcactataagagttatgctgaatattaatttcagctcccccttgtgccaacaaatctctaccccaaagattaatggggattggcatgatataaggctgaattgcacccttttgaccatcagggccaatgcaaggcaagataaatgtgctctggtgaacttcatcagcttttccaacacctactagtcccatgttagtgggatgtttaagtcaagaggaaggccataaattagaggaaatattagaaatgtcagccccagtatctactaggccctcaaacttttttccttgaaggcgtatggtgcaggtgggccattgtttagaaattacgttaatcaaataagtggctttttcaccaccagagcccatcccagggccccgtgtcttatctcctttgtttaaacaatattaggtagtgaaagtaattgagcaattgactcactggccggaatggaaacaggaaccttggcagacaccataagtttaatctcatcagaggaatcagaattaatgagacaagtatgaactatgatacctttagcagaggtggataccctacatcctacataacaccaggcccaccgaaccttgagataaagggccagtgacccctctggggacaattaaaggcaaagaattaggtagtaaatttagaggaatggtaatacagagatcgacccccctgacccctactgtggaggtagacaagcactgtactgagatagaagaagaggatgggacccatctgggttggctgtaggtaaatttgtttgtgctgggggctacgttgggaccacttgaagtggaaatgcaacattggtctgagtctgaggtgtcccatttgatattggggtctgggactggccccacttcccatttccctggttctgtggcaagggatttgcatctatatcagacttagaggggcaagtacttgcccagtgtttatctttagacaacatgggcaaacagtagtaggagaatttgactgtgtttgttgagccagcttggctgcttttaagtttttaacaggctccaagaaaagaataagttgagacagtttgactgccatccttcatggcctgtgcccacagaatagctttgtgggtctctgatccaatgccttcccaagctttaatatatgcaggcaacacctcatgatcaggaaaattttgtctttggatggaacacatggcaattttacattcatggttcacattctcaaaagctaacatatgaaggagaataccttgagcatgctcatgagagacagatttttcaacagcatcttgtaatttagccaaaaaaatgagggtataattctgaccttgtttaacactagtaaatgaaacaggagcttggcctggggtgtgtaatttatcccaaactctcatacacaacttcgttacttgttccatggtgagagcatcaaagcctaattgaacgctagtgtcagagtaattatcagagcctgtgagctgagcctgagtaattagaatgccatcagcccaatttagttgagcctgcagacgggcctcctctgaccaccaggtacagaattgtaaatgctgagatgcagttagaacagcttttgccaaaaagtcccagtctaaaagaagcaaaatgacctcagtacaaagagtctgtaataccattttaacatatggagaactaggaccatactgaataaagagatccttgaattcttttaaaaaggtaagattgagcagtgcataccaaagcacttgtaccccttgagcatcaggaggttccagcatgaccggataagcctacatctctaatccacttgtttctttgttctggtgtaataagtgttgcattaaagtttcaagaacaggcacatgagacggagttggcatagaagtgacaggaaaagtatgtgcagataagagaaactgaggttgaggaggtcagactggtatgagagtgtgagaaaggggcattgggggagcacaagaggcagaagcatactggtgattattgtcccagtcctgtgcaactagagtggcaggagtgtccttgcatgaagaagcgtatagagaagcaggctgagtggatggcaaagtgactgattgagggaccaaaatgacaggagggtgaggagctgtggtggatgggggagggcctacagaattacaggtaaattatagtttggtcctggagccattaggggtctccggaggcaaagcctgcaaacgtttgaagagggaagagttagcatagatatggtcctggctgtccaagttggggccacgggagctacaagtaccggctcttcatgaaaagaaataagatcatcaggggagatgttaagccaaagtcactggagttagatattgaattctcaacattgtcaggtcagggaggagtaggcaaagggagaggctgagcagataatgaaggccgagtgggagaggaaagctgaggaagaggtagagggttgccagatttagaaaattgtggtaactgcaggggacacgggattggtatgtcattaggacaccaggtaccaagtcccaatcaccccaaacagtgatggcaacataatttcctgtcaggaccagttcccagaattttgcaccaacatgatcccatagttccacatctaacgttcccttttcaggaaaccaaggacagtattcttccactgccctgaatagggtgaccatattttccttgggcaccagaactccaccaagttttaacaggagtttaatatagcagagataagcaaaatgtttagactccatgtgacccatagttaccgcagacaatacacagacaactcaccaatcgtcagggagtcaaacaagcatttctgtggactggaccaatgaacattcctccacacctaccaaagggaatcaggttcccacatgcacttaggaaaaagaaaacaacattggcacaccagttattggggaaaaccacccccaatacttcaacatatgttctttctattttccataagtgtcggccggctgagaaataaagagaaagagtacaaagagaggaattttacagctgggacaccaggggtgacatcatatatcagtaggaccgtgatgcccacctgagccttaaaaccagcaagtttttattaaggattttaaaaggagagggggtgtatgaacagggagtaggtcgcatgcttcaaggggcaaaaagcagaacaaagatcacatgtttctaagggaacaggacaagggcaaaatcagaactcctgataagggtctatgttctgtagtgcatgtattttcttgataaacatcttaacagaaaacaggatttgagagcagagaaccggtctgaccaaaaatttaccagggtgtagtttcccaatcctagtaatcctgagggtactgtgggagatcagagcatatctcagtccttatctcaactgcataggacagacattcccaaagaggccatttatagacctccccccaggaatgaattcctttcccagagtattaatatcagtattccttgctaggaaaagaatttagtgatatcttccctacttgcacatccgtttataggctctctgcaagaagaaaaatatggctctttttgcccaaccccacaggcagtcagaccttatggttgtctttccttgttccctaaaaaccacgttattctgttctttttcaaggtgcactgattgcatattgttcaaacacacatgttttacaatcaatttgtactgttaacacaattatcatactggtcctggggtgatgtacagcctcagctaatgaagataacaggattaagagattaaaataaagctaggcataagaaattatggaggtattatttgggaagtgataaatgtccatattaaaatgaaatcttcacagtttatgttcctgtgctgcaactccagccggtccctccatttggggtccctgacttcccccaacgctatgttagtgagttttttcagggtaggttacttttttttttgttttgagataaagtctcgctctgtcacccaggctaaagtttactggcacaatctcaaatcactgcaacctctgccttccgagttcaacccattcttctgcctcagcctccaaagtagctgagaatacagatgcatgcaagcccagctaatttgtgcattattattgtagcaggacaagctgcagacaaaacccttcagacaccaagttagagaagaaagggctttattcggccaggagctttggcaagactcacgtctccaacaactgagctccccaagtgaggaattcctgtcccttttaagggcttgcaactctaatggggtccatgtgagagggctgtgatcaattgagcaagcaggggtatgtgactggaggctgcatgcactggtgattagaatggaacagaataggacagggatcttcacagtgcttttcttgtacaaataactgattaggtcagggttgtctgcttatggatttcatttctgctttttagtttttactgctttctttggaggcagaaattgggcataagacaatatgaggggtggtctcctccctattccccccctttgagaatctcagtagtgggagttctcactttcattctggctacccgtgtcttcttacaaggcagatcgatagtgattcaaatagtacacttgtgctgaaacattttggtgaactaaggtagcagtgaagctttttatcatttgaaaaagtacaggtagcaaacaagggagcagtaagcaggttcctattactattataactcttattataacagttttaaatgctcctagcactggaaaccattttctaaacttggcaccaggatcaaatccatgccacatttgcacaggcacatgtgccagttttgtcatatctctaactatgtcttcaattacttgcccttggtcatctatgtgtagacctcaattagtaaggttaaatttcccacagacccctccttcagctgctagtaagtagtcgagagccaatctatcttgataggtaggatttctcatctgagtttcttgccaggccagaatagtcaaggctctgccagttttattagtggttatttctaagacagcttgtaaccatatcatttggttgagcatgtaaatggggttgtagtatccccacgagccgtattgtgcccaagtagcaggcccataatattgtgtgattctctcagggagccattcatcatcttgccaattccctatggctatgcttctcttttcatgagaagcatagacagggaagccaggagttcacctgtctttatgggcaataggaagaaagattgtttaatagtgccaataacacaactacctgcccactggttgggtaatttggcataagctctatgcccacatatccagtataatccagtgggggctgtccagtcctggtgggactctgggtgggtctacacggtttgcaactttgggaatttactaaatggattcctttctgtgtgatttgaactgtaccaagtgactgtttttgtggtaccattatacaatttatgtcccagacaaataagttgtcctatgggatgagtgaattattttccttctctagctatgcaatattgtccaataattgaggcttttagggcccagaaattatcagggtgattcttttgagccaggaattcaacaggaactgggtctataggtactaatccttgggcttcccatggccaatgatctcccattacagttcctccacacacataacatgaagtgttattgagagactgggctatgtgctcagataattgcaaaaacaaatttcttgtttttctgggaatttttggtactggtacatttagttcatcataggaagtttgaaacactgtctcaggagagcgtttgtaaacttctcctcaaactaagatatttacttgaggatcccatccagacccgtcaattcctaaggtcacacactcctcttttttccagtgaggatcaaggggatttgttattactagctctgtggggttacattttcccttaatacaggaaaggctattttttccttcctgaaagtggactggatccttttcattttttatccaagttgcccaagtgacacaagaccaatatccacattcattgccacacaatcctaattcatgacaaatgtactttttttcagtcatatagcctttttcccaactaaaagagcgaccttgccttcctaacttattgctattaatgacagcactggcatcaaatctcaagattatgcgtttgggcacccctttttattctgttgtggtcaatactttacttgtatcatttatgagtccccaccagacttcagtccttaatctttgttaaaaaactgtggacatgggaggctcagaacggtcataacacacatctggccagtcttttcctgggctacataccttgtactgagtgccattatataagcatgttccttttaaagtccctagacattcatagtaactatagaacagaaagattgttttaacttgttgccctacctcggtaacctgatgtatacactgagagcagtcctccatgtggggaaaatcagtggaagtttttactatacaagcccaaattataaggaagatgagtcccacgatgatcctcctcatgctttggccgtgcatagaccagtcagcttctgggtgtgactggagcagggcttgtcgtcctcctcagagtcactttgtagggggtgtccgggctcggttttgcctcccaggtttcagcggctgcaggtttcacacagctgtggtggatccaggctgggattccttctacctttacagctgtgggggtggtcaggatgacggtctgaggtcctttccaccgtggcctcaaaggggctatgttgcagtctttgatccaaatgcaatcacctggagagaaaaggtgaactggggagaataagctgatgggacatctctcatttacccaagttgagattgtttgtgtaatttttcctaaagcctgtagctgtcactgtaattcaatttcacctaactctcagggaatgcctggaagcccccatagtataggaggaggtctatgatacagtatttcataaggggagtatcctgttttcttagaaggagtgcatctaattttaaacaataccataggaagggcctgtatccactttaatcctgcttcctgacatactttccctaaactatttttaatagtccgaatcattggctcgacctttccggaactctgaggtcggtaggtggcatgtagcttccaagtgattcctaatgcctttgctgtcttctgtaccaagtcagccacaaacactggcccattatctgagccgattcataagggcagtccaaacctaggaataagatctcagagaagcacacaggttaccttgggggccttttcagttctttttggataagcctccacccacccagagtaagtacacacaggaaccagcaaatacttgttacctgcacatttctgtgaaatccacctgaggatcctgaaaaggagctgctacataagcttgtatgccaggcagaacagtgagacattgcctcatattgtgctgtcggcaagtaacgcactgtttggtactgctttggcaagggctgggaagcgtgagatgtagaagtaccagcctaacaatttttcaaatgactcttgacctagatgagtggtttcatgcatggccaatacaattgtggctcccagcaactgcagcacagctactctcccatctggcagtctgatccatcctccttttattacttgcccccttctgtgtggaagaagtctttttctttcttaggtaggtaccaggtcaggtatttgagggagtaagggggctgctactgatgcctagtatggggtagatgctgcttttcgagcttctgagtcagctcgggagtttcctaaggccactgaggtggagcctcactggtattccctgcagtgcatgactgccaccttctgaggtttccacactgcctccaataattgtagaatttcttgttgatattttatgtcctttcccccagagtttaacaggcccttttccttatataatgctccatgcacttggagggttagaaaggcatgtctagagtcaatgtagatatttacagtcttaccttcactgagttctagagctcgagttaaagcagtgagctcagccttctgggctgaagtgccctgtggcaatggtttggtttcaatgacagcatccaaagttaccaccgcatattctgcacatctttctccttgtgggttgatgaagctactcccgtccaaatataactccaagtctactgatgcccatggctggtccctaaggtcaggtctgctagaataaactgagtccaacacctctacacagttatgctcgactgggctctctgatactgggagcagggtggtgggatttagggtgttacagacttcaatgtttatgtggggattttcacatagcaagctttggtacttggttaatctagcatttgttagccaatggtgtcctttggtgttcatcaaagttaccacagcatgggggcttttatattcagatttggcccaagggttagtttatctgcttcttgtgctaacagggctgttgctgccagggcccttacacatggtggccagcctttggagaccccatctagttgttttgagagataggccactggccttggccaggaccccacagtctgggttaaaactccaactgccattgtttctctttctgacacatagagtgcaaaaggctttgtcaaatctggtagtcccagggctgggaccaatgtaagtttttcctttaacttacaaaaggcttgctgttgtagaggcccccattcaaaaggctcccagttgcccccctttgtaatgccgtacaaaggtttggctagcactgcaaagtttggaatccataatgtgcaaaaccccacagctcccaggaattcccttacttgccttctggttttaggttccggtaggctgcagatgacctgctttctttctgaccacaggctgtgctcccctttccaaatagtgaatcccaggtagcgtacctgctgtctgcagatctgagatttcttcttgggcaccttatacccacagtcctccaggtgctgaaacagggcatcaacccttttgagcacccaactgccatggagtgtcccagcagaaggtcatccacgtacaggagcaagacatagcttaggtctttagcaggaaacttttgcaagtctcaagtcagagcctccccgaagatagtaagggagttcttgaacccttggggaagccagttccaagtgtactgagtagtgacacctgactgtagatcttcccaccgaaacgcaaacagcttctggctctcaggagctattctgatgctacagatggcatcttttaagtccagatgggtaaaccagatgtcctcagccggcagcagccctaacaacgtgtaagggttaggaactgttgggtgcagagtcactgtagcttggttgaccaagcgcaagtcctgtactggttggtagtccttggtccctggcttagggactggcaggaggggggtgttccatggacactggcaaagaactataattccataggctttgaagcacctgagatgaacccggattccttcgagagcttccctgggaagggatactgctttcatctaatcagttgggcccaggcttaacttctatgagtatgggggcttggttggccgccagtcctggaggattatcctctgtccattctcaagaccaacgctcagctagagctggttgtatctcttcccattcttcttcccaggggactgtaaggacaatgataactcctgttcccagtaactttagctgtaaagagccgtgttttgtaaaggagatggtggctgtcagcttgctaagcaagtctcttcccagcaagggcaaggaacagccaggcatgtacaagaactggtgaactacttcatgtcttgccaccgagtaggtccgtggcagacagtaagtctacttagtagaaactcctgttgctcggattatatcaatggttttcttggacaagggggtgaccggggtggtcaataccaaatgttcaacacctgtatcaaccaaaaacttaatatctttgcccccaattgtaatcctgaccgtgggctccttgggggtgattgagcccagtccccttcagtccaatagcccttcagccagattgaataaagctccctcatctttatctgaggtcttttgttctgaatcatgttgcttttccttcagttggggacacttatttttccaatgtcccattttcttacaataggcgcattggttacattgcaagcgtgggtgattagacagggtattattcccagaacccccctttccctctccttttgggggaattcccctgatggccacagccagtaagttggcgtttcgcctggcctggctttcaccttccttacggctttctctgtggcttgttgcatctctattcaaacacttgattggctatttccagtaactgtgagatattcatacacttaagcccagcctgtttctgcagttttctcctgatatcttccacgctttgactaactaaggccatgttgatcatgtgctgattttcagggctatctggatcaaaatgagtgtacatactgtaagcctcacaccgtctttcatagaattgcgctggactctcctctttttcttggatgacctcagagatcttatttacacttgtagccttttaagcccctttctttagaccttctattcatgcatcatggtactgtcttagcctctccatgtctggtcactagttcaggtcccattgggggtctgttcctggcagctgaattcttatatattcttggggattttggtaatccactgggatgtgctcctctggccacttagttgccacccggagcacccttagcctttcatcaaagaggtacatgaacagctggtggcaatcagcccaagtaggattatgagtgtgtataatagtttggagcaagtcaattaaagcttgaggcttttcagtgtaagcagcagtattatttttccaattgatgaggtcagcagaggtgaaaggttgatacacaaagtcacgcctttccaccatgtgtccatcctcatctaccccagtatatcactgctgtctcaggggcatttggattccagtcttgggccgtaagtgagctgccaagggaggagtttctcccgtggcttcacttcctcttttgtctactctgggtggtctaggagtgtggctatctggtggaggtgtgggtgctgtgggctcaggagtgggaagcccttcctcttgcaattctgaccatgattcttctggtattgggtcagacagggcttttggtgccggcttccctcagcaggtggagtgagaaccttccttaactaactgtccctttgctactagtactgctgctgcctgtcctcttaactactgtggggggtccaaaactagctctaaccgagaatctttatacaggaactgatcggggtgccctggcttgtaggttacactgtgccataccttcaatacaagggacctgttcaggcttccttctgatggccaacccacctttaatgctggccagtctaactcacacaaagttctaagttttcttggtgtcatagtaactccatagtctcccttaaatccctttttgaaatttttcaacatagctcctagtggggtgggcctactttgtgcctgacccatgtttcctcgagacaaaacactgcgcttacaccacatgcacaccacaaaacaaaaacaggtaaaaagggcacacacacactttttcagtttacaccaaaccagaatcagaaccaaaatcagagtatcaagaaatccaagccaggtcaaaaccaaaacctaagtatcaagcaattcaactcaactcaaaaacaaaaaacctaagtgctggtatgggcacgtcatgggtgatcaggccacgcttccactcaaatggagtaggcaagttccaaagactagtcttaccaagtttcagatgtctggattccaagtgccagttccttcctgatgttcagccactgcagtgatcctccatgggggcctgccacacactgctctggtgaggcattccactggcgcagttgcctacccgggagcactctcaggatccgcgttgctcaagctggccagagtcccctgcagggatgcttcacagggcaggcctaagctgcctaagtggctgtctcaatggtcctttaatcacctgcttcccagtcagggaaccaagaaatgtagcaggacaagctgcagacaaaacccctcagacaccaagttaaagaaggaagggctttattaggccgggagctttggcaagactcacatctccaacaaccaagctccccaagtgagcaattcctgtcccttttaaggggtcacaactctaagggggtctgcatgagagggtcatgatcaattgaacaagcagggggtacatgactgggggctgcatgcactggtaattagaacagaacagaacaagacagggatcttcacagtgcttttcttatacaaataaccaattaggtcaggggtcgatctttaactaccaggcccaggttttggtgccaggctgtctgcttgtggatttcatttctgccttttagtttttacttcttctttctttggaagcagaaattgggcataagataatatgaggggtggtctcctcccttattattagagaccacatttcaccatattggccaggctggtcttgaactcctgtcctcggtgatctgcctgccttggcctcctaaagtgctgggagcacagtcttaagccaccgagcccagcctcagtgtaggtttcttaacatcagtttattgtgtttattgggtttacttacgtattataaatttagacaattttcaattctgcttgtactctttaagtcaacttgagtttcaactgaaaaataaataatgcatgtgtatcccaatcagattacatgtgtatgcattgtcacacatgtccatgtgaagagaccaccatacaggctttgtgtgagcaataaagctttttaatcacctgggtgcaggctggctgagtccgaaaagagagtcagcaaagggagataggggtggggccattttgtaggatttgggtaggtaatggaaaattacagtcaaagggggttgttctctggtgggcaggggtgggggtcacaaggtgctcagtgggggagctgctgagccaggagaaggaatttcacaaggtaatctcattagttaaggcagaaacaggccattttcacttcttttgtgattcttcagttacttcaggccatctgggtgtatatgtgcaggtcacagggtatatgatcgcttagcttcagctcagaggcctgagattcttgtcttcttatattaataagaaaaataacataaaatagtgttgaagtgttggggcagtgaaaattttggtggggtggtatggagagataatgggggatgtttctcagggccgcttcaagcaggattaggggtggcgtgggaacctagagtgggagatattaagctgaaagaagattttgtagtaagggcaatattgtggggctattaaaaagagcatttgtcatatagaatgattggtgatggcctggatgcagttttgtatgaattgagaaactaaaccaaagacacaaggtctgaataagagaaggagcaaaacaggtattaaaggactaagaattgggaggacccaggacatccaattagagagggtccaagggggttcagagtaattacttgtttggttggtgagttttggggctctattcttgacagagtcctttttgttaagttggaggctgagcttgctgaggtatgttctgaaaagaccattaatccattctacctttcctgaagattgaggacagtaaggggtatgaggtttcaatgaataccaagagcctgagaaactgcttgggtgatttgactagtaaaggctagtccattattagactgtatagaggtgggaaggccaaactgaggaattatgtctgacagaagggaagaaataacaatggtggccttctcagaccctgtcgggaaggcctctacccatccagtgaaagtgtccacccataccaaggagtgttttcatttcctgactcggggcatgtgagtaaagtcactttgccagtcctgggcaggggtaaatccccgagcttgatgtgtagggaagggagtgggcttgaataatccctgaggagtagtagaatagtagatggaacactgagaagtgatttccttggggatagatttccatgatggaaaggaaatgagaggttctaagaggcagtctagtggcttgtaacctacatggaagaagttatgaaatgactacagaatggaatgggtctgtgaggctggaatgagatattttccttggtccaagaatcatttgccttgtgtgggaagagattgataggtgaaagtttcagtgggggagtaggtgggagtgaccagataagaaggagaaaaactgccatgagggatagaagttggaatgctagctgctttttagctaccttatcagcataagcattgtcctaagtgatgggatctgatgccttttgatggctggttttttagctaccttatcagcataagcattgtcttaagcgatggggtctgatgccttttggtggcctttgcagtgaatgactccatcttcctttggaagtaaagccgccttgacaagagtttttattaaagaggcattaataatggaggacacttgtatagtgagaaaacatttttcagcctatataacagcatgggggtgcaggatatggaaagcatgtttagagtcagtataaatattgatgcatagtccctttgcaagattgagggcctgagttaaggcaacaagtttggcttgctgagaggtagcacagaggggcagagcggtagcctcaatgatagacatggaagatactatagcatagcctgcctttgctggtgagtggcaattaggcctggtggaactgccatcaataaaccaagtgtgatcagggttaggaacaggaaagaaggaaatatgaggaaatggagtgaatgtcaggtggatcagagcgatacagtcatgtgggccagttgtggtatcaggaataatgtgggggccagcctaaaacagtaaggtcaagttgtttggacagaaaggctacacagtgcagtcccagctcttgtgtaagaattttgaccacacagccctgtacttcggctgcatgtaatgaaaagggttgcgatgagttaaggagagctagtgtgggagtagcttctagggctgcttttaaggaatggaaagaggagtggtgaaaggatttaggatctgtggggtcagctaggtttgctttttgagtttatacaatggtttagtcaggatggtaaaactagatatccaaaggcagaagtacctaaccatgactaggagggaaaggagttgttgttttctagaaggggttggggtttgggagattagctggacacaatcggtagggagagcacatgtgttttcatgaagaattatgccgagataggtaatggatgagaaagaaatttgggcttgactgaggtaatgggagctgtctgtgaagccttgcagcagtacagcccaggtaatttgctgagcctaatgggtgtcagcatcagtccaagtgaaagagaagagaggctgggatgaagggtgcgaagaaatagtaaagaaagcatgtttgagattcagaacagactaatgggttatggaggggttgtggagggaggtattgaggataggaaagtatatggttttgacaccaatgggtggataggcaagacaattggttgataaggtacagatcctgaaataacctgtaagtcttgtctgggttttggacaggtaaaatgggggaattgtaaggagagtttataggctttaaaaggccatgctgtaacaggcaggtgataacgggctttaatcctttggggtaagggtgattaggttttaatgggatggtaagaggtgcatgaattgtcaccaaggagggagtagaggtgtcctatacttgtggattaaaatggggagatacaaggggaggatgtgaaggaggctttgaactggggaaaaggatggcaatgaggtgtggctgtagcctaggaatagtcagggaagcagataatttagttaaaatgtcttgacctaataagggagctgggcaggtggggataactaaaaaggagtgcgtaaaagaatgtggtccaagctggcatcagagttggggagttttaagaggtttagaagcctggctgtcaatatccacaacagttatggaggcaagagaaacacgcccttgaaaagaaggtaatgtggggtgggtagcctccgtattgattaagaagggtatggactcactttccactgtaagagttacctaaagcatctgtgatggtccaggaggcttctgaggtgattaggcagtgtcagtcttcagccgctaagccaagaatatctgggaaggagtcagtcagagagccttgggctagagttccaggggctctaggagtggctgccaggcgagctggacagtctgattcccagtggggtcccgcacagatgggacatggcttaggaggaatcctgggctgcaggcattccttggcccagtggccagatttctggcacttgaagcaagatcctgagggaggcggtcctgtaggaatgcctgaccactgtggcttaggcattttgaagttcttgtgtgctggaggtgtggctgggttttgtctcatagcagaggcaagtaatttttactcttctctattattgtacaccttgaaggcaaggttaattaagtcctattgtggggtttgagggcaagaatctaatttttggagcttttctaatgttgggagtgggttgggtaataaaatacatattgagaataagacggccttctgccctttctgggtctagggcggtaaaccatctaaagttgttgccaaatgggccatgaactgggttgagtttctatatttgatgaaaaagagcctaaatgctaactgatttgggaaaggtcagataaagaaaaaggagtgttaaccttggctatggcttcagctccagccacctttttaagaggaaattgttgggcaagtgggagagggctagtcatggaatgaaactgtaagccagaccgggtgtgaggaggggaggtgataaaaggattatagggtgggggaacggaggctgatgaagaactgggacctggcttggcctggcgaggagcagcttggggaggagaggacaggtgggtctgtagaaaaggaagattgaaaagactcagtgatgcttggggttgggactgaagggacaggtgggagggaaagaaggaggatttgtgatgagtcgcattgggaacagagattagggagggaccaatgtgtaaaagaatgcctggacatcaggcatctcacaccatttgtcttttttgacaaaaatcatccaggtcttgtaaaatggaggaatcaaaagtgccattttctggctatttagaaccattatagagtttgtattggggccaagtggtgttgcagaagaaaataagatgcttaggttttaggtcaggtgagagttgaagaggttttaagtttttaagaacacaggctaagggagaagatgcaggaatggaggtcagaatgttgcccatagtgaaggatgtaagtttaaggagaaaggtagagacatggagaagagggtggtgagcagccctgggctgcaatatgggtgagcatccaaagcaggtgtccccgcaattaacttgccaccaagggaatgtgggtgaatgaccaaggcagatgtccccacggtgatcagacgccaatgaaatgtgggtgaataatcaggcaggcatccccacagtgattaaacaccaagggaaaactgtcttcctgagtctaagactggcaccggagttttgggtccacggataaaatgtgtctcctttgtctgtactagagaggaaaaagaactggagttggaaggacagggagattgaagggtagcaagagaggctggagaagagagtgaaaagaccgcttacccgatttgaaattggtgagatgttccttggactggttggtctgaggacccgaggtcataggtagatttcctcacggagtgagggcggggacaggcctcccgaaggattacctctgtcctgggtttttggcaccaaatgtcatgcgtgtccatgtgaagagcccaccaaacaggcttcgtgtgaacaataaagctttttaattacctgggtgcaggcaggctgagtccaaaaagagagcgaagggaaataggggtggggccattttataagatttgggtaggtaatggaaaattaccgtcaaagggggttgttctctggtgggcaggggcgggggtcacaagatgctcagtgggggagcttctgagccagaaggaatttcacaaggtaatgtcatcagttaaggcaggaacaggccattttcacttcttttgtgattcttcagttacttcaggccatctggatgtatacatgcaagtcacagtggatatgatcgcttagcttgggctcagaggcctgacatgcgtgtttatctataaatacgatgccaattttacttatggcttatctcatattctttgttagctgattttcgatggtagttttatcttgtctaagtgagtagtcgtggagatagtcattatcacgatgtgtttaatgatgaatatatattttctttttgtgagagaaacacttttgtgatttgaagttaatttttaaaaagatttaccattctgtatttttgtcagtttttccttgaaaacgttgttttaaaaacacataacataaaatttaccatcttaaatttattgaagtgtatatttcacagccagctgtggttgtggctctcatctgtaatcccagaattttgggaggtcaagacaggaggatatctggagctgaaaagtttgagaccagcctggggaatacatggagacccctctccataaaaaaaaacttaatagtagccaggtatggtggtgtgcagctgtggtcccagctacatgggagattgaggaggagtcaaaattgtgcctctacactccagcttgggtgacagagtgagaccctgtctcaaaaaaaaaaaaaaaaaaatgctgttcacttcaggcatgttaagtatattcacattgttgtgcaaaagatttctagaaactttacatattgcaaaactaaaactcagtaaccattaagtaacaacatctcattttaccctctctccagcttttggcagacaaaacttccactttttgtttttatgattttgactacttaagatatctcatataagtggaatcatacggtatccataattttgttactggattaattcaactgacataatattctcaatgttcatcttaaaatgtgacaagattgttctttttaaggtggaataatattccatcgcatgtatatgttacattttttgatacgtttataaatcaaggaacatctaggttgcttcagacttttggcttttgtgaatactggtataataaagatgaattttcaaatatgcctcccaggtccagtgttgcattttttttttttttttttttcccgcagacggagtattgctttgtcgcctaggctggagtgcagtggtgtgatcttggttaactgcaacttctgcctcctgggttcaatcgattctcctgcttcagcctttcgagtagctgggattatagatacccaccaccacacccagctaattttttgtacttttagtagagatggggccaggctggtctcaaactcctgacctcaggtgatctgccccctcagcctcctaaattactaggattataggcttgagccactgtgcctggccttcgttacatattttggatatagatttataaatgaggaacatttataatttttaaaataatggctgcatctttgttttccaccaacattcaatatggatttcatttttattgtatcatcaacagatttggtgttttaaaaaaatttatcatggccatattaatgggtatgaggtgattttgtttgtcattgtggtttttttttcatttctttacaaattagtaattttatgtgtcctttcaaatgctttttctcatttgtgtacttttctaatgaaaatgttgtttgtccgtttctaaatcaagttattcaaccttattttttagttttaagagttgtttatatattttgaatattaacttctttcatgtttaatttgcaaatgttttcacctattttctaagggatgtcattactcttgaattgttttttggtatgaagaaattttgaagcctattgtagttaaaacttttctgttatttcatttgctgctcatgtatttaattttgtatctaagaaaatggtgccaaggccaatgtcatgtctttttcctgtagtttttctaaaagatttgttagtttttttatgtctcagcattttatttaaaatatatttttgtatcattctaggaaataatccaacttaattttatcagtgctgatattcagttttcaacatcatttttttgaagagattatttctattttgtgctcatggcaacttcgtggaagatcatttgatcatatacagaaggattcatttctgagctctctattctgttctttcatctgttcatctttgtttctgtatcacattgtttatattctttagcttttaactgtaggttgtattgacatctttgaaaaataacattttttgacccctgagcaagaatatgttgatgaagagtgtgtttcatattcacaaggttttgaatttgccagtttgacttttgcttttaattcctagtttcattcagcttttgttggaaaacacacagtgtataattttagtgtttttaaagtgatttgttgttgttgttttgagacaagatcttactgtcaccaggctgcaatgctgtggcataactttggctcactgtagcctcagtctcctgggcttgaatgatgctttcacctcacttttctgagtggctaggactacagtcatgcactaccatgtctggctaattgtttgcttctttgtagtgttaggatctcactatgttgcccaggctggtctcatacttctggcaccaatggatcctcttaccttggtctctcaaagtgttaggattataggcaagagccactgcacccagtcagtattttaaaatttaataaaacttgctatgtgtcctaacggaatacaccagatgcaaatagaaatattgcatattatcttggttttgactggagagttttgtgtgtgtctgtgaagcctagttggtctataatatggtttggatgtccatgttctccaaacctcatgctgcaaaataaatcctcaatgttggttgtgagacctggtgggacatgtttttgtatgagggcatatttctcatgaatggcttggtacatcctcttggtaaacaaaaagtttacactccattaattcaaatgagagctggttcattaaaagaacctggcttcttcacctcacacttgctctgtctcttaccatataatatgtccagttactttttaccttctaccatgattttaagcttcttgatatcctcaccagaagcagatgctgacacacacttcttatacagtctgccaaactgtgagccaaataaacattttcctttataaattatgcactcccatgtgttcctctatatgcaaaataactaatatagtctataatgttgtctcagttttctgtttcttattttttatctgaattctctatttatttcttcaaatggggccttgatgtctgcaattattatgtcgctatgtatgtcttgcttcacttttgtcaatatttgctttatatattttaaagcccttatgttatttacacatatacatatagatagataaatactataaattcctgctaaatcaactcactttaccataatataatatcaatcattgtctcatggtagtacttaaagcatattctgcccaatataattatgaccacctcactcacttgtggttactatattcatggaatatacatttttttattctgttactttcagcctatttgactcaatgattaaattagtctcttgtaggcagcatactgtatgctttataaaaaaccactcaggcattctatatctttttctttatataattttatatatatatatatacacacacacacatatatatatatacacaagtgtatgtatatatatatatgtgtgtgtgtatgtatatttttttccagatggagtttcactcttgttgcttagactggagtgcaatggtgtgaccccagttcactgcaacctctgcctctcaggttcaagcaattttcctgcctcagcctcccaagtaggtgggagtacaggcgcctgcaaccacacccaggtaattttttctattttaagtagaaatggggtttgaccatgatggccaggctggtcttgaattcctgatctcaggtggtctacctgcctcggcatcacaaagtgctggtattacaggcatgagccaccacatccagccttgtgtattttggagatagtgtctcactctgtcaaccaggctgatttgctcggttcactgctgcctgaatctcccaaactcagatgatcctctcatatcagcctctcaagtagctgcattacaagtatgtaacatcacacccagccaacttttttttttgtattctttgtcgagacagattattgccatgttgccgattctggtcttgaactcctgggatcaagtgatcagcctatcttggccttccaaagtcctgagattatatttcattttattaagtagtttaatacgtttaaatttaaaatgattccttaaagaaatgaagttgttatttccagatatattgttattgtttcatgtgtttctagtagtatatttttctcatttccttttttactctctttaattttgtactggcatgctttgattattttttgttttattttagatactttctttaaacagaatctttgcaatcatcttgaaaactgtagattacatacatcttacagttaaagcaatatattttaatctcatgacaacttcaattgaatacaaaaactgtgcctctatattttccagtttgttgttgatttttttttattaaaatgtgcatcattcttttatttttatttatttattttttattgatcattcttgggtgtttctcgcagagggggatttggcagggtcataggacaacagcggagggaaggtcagcaaacaaacaagtgaacaaaggtctctggttttcctaggcagagtgtttgtgtccctgggtacttgagattggggagtggtgatgactctcaacgagcatgctgccttcaagcatctgtttaacaaagcacatcttgcaccgcccttaatccatttaaccctgagtggacacagcacatgtttcagagagcacagggttggggttaaggtcatagatcaacaggatcccaaggcagaagaacttttcttagtacagaacaaaatgaaatgtctcccatgtctactactttctacacagacacagcaaccatccgatttctcaatcttttccccaccttgcccccttttctattccacaaaaccgccgttgtcatcatggcccgttctcaatgagctgttgggtacctcctcccagacggggtggtggccgggcagaggggctcctcacttcccagtaggggcggctgggcagaggcgcccctcacctcctggacagggcagctggccaggcggggggctgagccccccacctccctcccggacggggcggctggccgggccgggggctgagccccccacctccctcccggatggggcggctggccgggcgggagggctgagcccccccacctccctcccagacggggcggctggccgggcggggggctgaccccccccacctccctcccggacggggcggctggccgggcagaggggctcctcacttcccagtaggggcggccgggcagaggcacccctcacctcccggatggggcagctgaccgggcggggggctgacccccccacctccctcccagacagggcggctggccgggcagggggctgacccccccacctccctcccggacggggcggctggccgggcggggggctgacccccccacctccctcccggacgtggcggctggccgggcggggggctgacccccccacctccctcccggacggggcggctggccgggcagaggggctcctcacttcccagtaggggcagccgggcagaggcgcccctcacctcctggacggggcggctggccgggcggggggctgagccccccacctccctcccggatggggcagctggccgggcggggggctgaccccccacctccctcccggacggggcagctggccgggcggggggctgaccccccacctccctcccggacggggcgactggcctgacgggggctgaccccccacctccctcctgggcggggtggctgccgggcggagacgctcctcacttcccagatggggtggcagccgggtggaggggctcctcacttctcagatggggcggttgccaggcggagggtctcctcacttctcagatggggcggccgggcagagacgctcctcacctcccagacggggtcgtggccgggccgaggtgctcctcacatcccagacggggcggcggggcagaggcgctccccacatctcagacgatgggcagccgggcagagatgctcctcacttcctagatgggatggcggccgggcagagaccctcctcactttccagactgggcagccaggcagaggggctcctcacatcccagatgatgggcggccaggcagagatgctcctcacttcccagacggggtggcggccgggcagaggctgcaatctctgcactttggggggccaaggcaggcggctgggaggtggaggttgtagcgagccgagatcacaccactgcactccagcctgggcaccattgagcactgagttaacgagactccgtctgcaatcctggcacctcaggatgctgaggctggcggatcactcgcggttaggagctggagactagcccggccaacacagcaaaaccccgtctccaccaaaaaaatacgaaaaccagtcaggcgtggcggcgcgcgcctgcaatcgcaggcactcggcaggctgaggcaggagaatcaggcagggaggttgcagtgagccgagatggcagcagcacagtccagctttggcttggcatgagagggagaccgtggaaaggggaggagagaggggagaggggagacgggagaggggagaggggaggggagaggggaggggagccggagtcactcttgttcgaacgcctccaacactatgactaagtaaaggagaatttctgttgttgattttaaaattattctatatggtgtatctattaacatttatgcggatttccatatttttatattctataaaagtactttaaaggttttgtgtaccatcattttgttagtttgttttgttttgttttgaatcgagtcttgccctattgcttaggacggagtgtatagatgtgatcttagctcactgaaacctcggcctcccaggttcaacaattatcctgcctctgcctccctagtagctgggattacagatgcctgccaccaagcctggctaatttcttgtattttttagtaaagataggctttcactatgttggacaggctggtcttgaactgctgacctcaggtgatccacctgcctcagcctctcaaagtgctgggcttacaggtgtgagccacagcacccagctggaaattactttttatctcactattcatagcatttcatatcaatacaaagattgacacatctagatataaatatacatagggagataaatactcacatagagaattctataaatatttctatctaaacatttatgtatacaaaacatgttccccaaaagacatttttaatcttttagcatgcactgaagatgctgatgtagaattacttcttttttcttttgctaaataacatgtcagaatggaacatagttatacaattttgtttatgtaaatatcaacaaagctctatcttcaaaggcaggccacagaaataagctgaaaagaaagtcatgtaacacatctgtccaggacagtatttcagcactctgcatgtctcctcattctgtgcatgttgtgttcacacctaccatttggggcctgtctcgacaaagccacagtcaccatttagataatttgataattgtatacacctgggctgagctacttggctggttgggatcacctgggctgtgcaaactggctgattgcaatcacctggtttctgctaatttgcttaatttatctcagcttcaggggtagaatacggagatgtcatctgacctactttatttctgaggttttttttaagggtcatatgcagaaataaacatttcatagacatacccatgtgactcattttgtgtgtatatgtttatcgagccacctattttgtatctatatgtacagaaagaagcctataaaataaacttgatctgaggctatttccattttctttacctacaggttaggtaaatcagtcagctactgagctcagtgaagatttattcaaaccaagccacacaccatattacattttttcataaatgtaaaaatatctttaataacctggaacctgggtgtttttaattctcatcccattaaaccagccccatgaggttctgttcgtctatctaggaactgccagaaatgcttgacatcagtgggctgagccttcctcacaaagcagatttgacctggcaaataagagccacctgtggcacttcagtgaatgttcactatcacccatttgaaatgtggccaagtaccatgtaccattatatttgcttccatcatcatcatcatctatcttctaaaaagagacctagacttctttttcattaccataaatacctgacttctgcctcaaagacaaaaagacaagagtgtgattttacatcacacactcttggaaataaatacagttcttgtcttgatgaaagttctaaagagaaagaataagtattctcatatttaggttaggacctttggactggggctggttcatctctgaccctacatacaacaataaaagaaaagtcaatcctgacatggcagtaaataactccaaaggccttagtaagtattcatcttccagaagcgcacaacaaagcccagtgcttcctttgaatatattaagtgcagcaggatgtatatcagagcattcctctatttctgtactattctagatatagtattctatagggaaaagatttttatacatgtatgaaaggtttttgtattactgtttgtagcaatagctatcaatacttccacattcaatgtctttattctgtatgaatatatataaagattgttccagcttcatatatatatacttatacatattaggtatgtatatgaatatacatacatggtagatacataaacacaaacatatgaatgtgtctttgtaaatattaatgtatacatataatattctcccactttttaaattatagagcgtatactaaggatgcaggtgtagaattaattgccttctgttttgctcagtagcatgtcagaataaaacatagccatacaatgttgtttatagaaacataaaggttcagcttcaggtttcaggccttgtaaagctgtgtggtatatactgtccaggtgagcaaataaggccctgcatttctttttggtgtgcatgggctatttacatttaccattttgggcatacctgaatgaatctgtagccactagttagataattagctgatcgggatcacctgggctgagctaattggctaattgaattcacctggactgatcagttggttgattggaatcacttgggctgagctaattcactgattgaaatcacctggactgagtgaatggtggttcaaaatcacctgtgctaaactaatgggctcatcagttgagctaactggctgattggtatcacctagaataagatagttggctgttagaaatcacctgggctaatcagccgggctgagctaatttgctgattggattctcctgggatgtgctaatgggctgcttggaatcccctaattggctgatttaaattatctaagctgagttaattgattcagaaaagttgaacactgagctgggccggtggctcatgtctgtaatcccagcaatttgggaggccgagtcaggcagatcatttgatgtcaggaatttgagaccagtctggccaatacagtgaaaccctatctctactaaaaatacataaattagccaggcttggttgtgggtgcctgtaataccaggtactggggaggctgaagcagcagaatcgctttaaccagggatgtggaggttgcagtgagccaagattgtgccattgcactccagcctgagcaagagtgaaactctgtctcaaaaaaagaaaaaatatctatctatctatctatctatctatctatctatctactgtcagaggatgataacttgaagtattttagagatgttaagaatctgaaattatttttacttttagtttttataaatgtttcttaagcatttttaatttccaaaaaacttgtaaataatgttgtcagtttaatttttctgaagaatttaaatagagtcaaattatacatatcaaaaaatctacttttctggtagtagatcagcttaattttcagaacaaatgtgttaaacttcacgagattttatgctgaccaatttgatcagtagcctctttcatacaactgggagagatgacaccaagatgtagcattcatgttgggtgagagactaaatgactaccagtagctagataatttctgttttactaataaatgtttattttcatttctatattgtctcaagttatgttaacaataaagtaataacctttatccaggaaattttgaaaacttattttttaatcagccataacagtaagcaaagacagagaaatgaaggtttttaccagtcataatttatatattaaaattaaaatacttctagaaataaagaaggaaaggaagaaagaaatatacaaacaaatgaaaagcagcctggtcaacatggtgaaagcctgcctctactaaaaatacaaaaattagcctggtgtggtggcatacacttgtaatctcagctactcaggaggcttaggcatgagaatcacttgaacctggtaggcagagtttgcagtgagctgagattgtaccactgcactccagcttgggtgacagaatgagactccatctcaaacaaaacaaaacaacaacaaaataaaagagaaggaaggaagttgattactcacaatagctaaggtttgaaatcaacctaagtgttcaccaataggtgaatggagaaagaaaatatggtatatatacacaatgaaatgctattcagcccttaaaaataagaaagtcttgctatttgcaacaacattcatgaacctgaaagatattatgttaagtaaaataagtcagcacagaaaaaaaacaaaatcctcgttttttttttttttgagatggaattttgcttttgtcacccaagctggagtgcagtggcaccatctccactcactgcaacctccagctcccaggttcaagagattctcctgcctcagcctcctcaggacctgggattacaggcatgtgccaccacacccagcaaatttttatatttttagtagagataggatttcccccatgttggccaggctagtctcaaactcctgacctcaactgatccacccacctcagcccctccaagtgttgggattacaggcgtcagtccctgtgcccagcccacataatcctatttctatgtaaagtgtaaaaaaaaaaaaaaaattaaactcatagaagcagatggtacaataataaaacaaacaaaaaatcccctataaggttttttgtctggttaagagagcttcttcaggatttttcaggggttatattttcttttattttccacattttcctgttcttcagccaatggatgaaaaaagatacagagaagacacatttaccttttatccgcttcacttccattcactattattcaatgtggatacagatgagagtagcagttttctagtaggacagccacttctctgcaataaacaaaaaactgaaaaaaaattagcatatgcatcagtaacccttctagtaaaataaagattaattttgttgatttctattgagttcctgtaatatttgatcaaaagctagcaaaagcacagtagaaaaggaaaattgttctaaataagaatattgtgaatggttattttgtcaatataagtaaaaatatgacctcacactaatagtctcacctatagttgtacaacatcaaatgctaatttttatttaaaattttatttcatataagtattcaatttatatcacctgcctctgctatttcaatgcctccttcactttatatcagtgaaaaacaggccagcaggtcctaggaaagcacgtcgtgctattgctactttaacaataaacaggtcaagcatggtggctcatgcctgtaatccagcactttgagaggccgaggtgggtagatcacagggtcaggagctcgagaccagcctggccaatatggtgaaacaccgtctctactaaaaatacaaaaattcccaggtgtggtggctcacgcctgtaatcccagcactttgggaggctgaggctggtggattgcttgaggtcatcagttcaagaccagcctgggcaacatggctaaacctcttctctactaaaaacacaaaaaattagctgtgcatggtggtgggtgcctgtaatcccagctacgcaggaggttgaggcaggagaatctcttgaacctgtgaggccaaggttgcagtgagccaggatcatgccactgtactagaccctaggcaacaaagtaagactcctctcaaaacaataaaatcagctgggcgtggtggcgggtgcctgtagtcccagctactagggaggctgaggcaggagaatcgcttaaacccgaaagccagaggttgcagtgatctgagatcataacactgcactccagcctgggtgacatagcgagactctgtctcaaaaaacaaaaaacaaaaactgatcatgaatagcacttttttggttgctacacacgtgtcaaacactgttatttggcttaaggtactggtttttttttttttctttttcttttttgagatggagttttgctcttgttgcccaggctggagtacaatggcacaatctcatctcactgcagcctctgcccacaaggttcacacaactcttctgcctcagcctccccagtagctgggattacaggcacctgcaaccacacctggctaatttcttgtatttttagtagagatggggtttcaccatgttggtcaggctggtctcgaactccagacctcaggtgatccacccgcctcggcctcccaaaatgctgacattacaggcgcgagccaccacattcagcctggttttctattttttttttttttttttttttttgagacagagtctcatctgtcgcccaggctggagtgcaatggcatgatctcggctcactgcagtctcttcctcctgggttcaagtgattcttctgcctcagcctcccaagtagctgggactacaggtgcatgccactatgcccggctaatttttgtatttttagtagagatggggtttcaccatgttggccaggctggtctcgaactcctgacctcttgatccacccacctcggcctcccaaagtgctgggattacaggcatgagccaccgcacccagccctattttttttctaaatttactggtaatataaaattcttcgctaagaagacatgatcttattcaaatgttttatgagatttcattgatgtctgaattatctggaatattaaaatttttcatgaactcaaatcaagtactatacataatcttttagtaaaagcttttctgaggcagagtaagatttataacattttattatcatatggaagaagtgtattaaccatgttttcagtaatcactctgaacacagcattctcagttcacagtgtaaaaagtgaagtagaggttcctcttcaaagacttttctacctaattatgaatagtaacttctcttagaagcaaagtttattcaaagacctgtgctaacattcttaaatatctgctaagcacaattaaaaaatcaatgtactttatgttcttagctcccacaatttagcctaaatatttgccctggcatgcttatactaatccaagcaagcattaggtcatagcctgttcctcctccttatttgaaggtatttttacctttctcagcattccacaagttacttcctccttcctttgttctcctctgcctttgtctcttttaaaaagttctaagttgctaaacaattgggacatacagaatgtgaggtcccattccagccaatgaaaaccagacacagcagtagggtggacacgtcaagttataaatgactctgtctcctctgttcagtgtactcgtggcaaaactgctttctgcaaaaagtaaaaatggccttgctaagaaaaattaaatttattttcaagtgctatttctttacagctccagagaacaaacatttctaaaaccattatggaccctgagtaattcagggggaattggtatctctgtaaagagacagtaaggaaatgctgagtggaggcaccacactgcacatcaatgctttccacatgcacccaatagagtcttaatttaattgggctgttatttgcatagctagataattaccaactttagtcatactattttttagcaactaatggcatctgttacccattaattttatacatttgcttttttgaaaaacaaatcttttgttaattcactctaaattgagactacatttacaatcttcagtttttcagtgttaaagcaaatcagagaagagcaatgtgtgtacataatgtgcattttcctgcctaccaaaattattctggctgggaaaagtggctcatgcctgtaatcccagcactctgggaggctgaggtggatggatcacctgaggtcaggagttcaagacaagcctggctaacatgatgaaatcccatctctactacaaaaattatccgggcataatggcgggtgcctgttatcccagctactcaggaggctgaggcggaagaatcacttgaaccagggaggtggaggttgcagtgagctgagcacgtaccattgcagtgcagcgtgagtgacagagtgagaatccttctaaaaaaaaaaaaaagaaattctttcttcaattacttggaaaccctgggaagcccctataaaatactccctttgaatactttagccaggatttcagatttcaaaaggtcaaaaacaatcattgagcaaagcttaaatcttgcctttgtttcttgttagtcatctggccatttctgtaagtacggcaattatgcgaagccattgaaaaaatgtggtcttggtaaattttattccatttcaaatgttttctctaatgttaccttggtcatgtgaatctaaaagaaactatctacataactaatcatggattcaaaaaatattcatattaatgtgtttacagtttaatcttgtattacagtatagtagaatcctctataattagaagttaattatttataaattcattgtttttaaggtttttcaaatatgaaaacagacaattaggtatactttttgaagtaagttcaattttaggacattacccactggtcttcatggcatttctgtaataaatagtgtaaacctgtgtcaccagaatggtgcagacatgctgattgaattagaatgagttcagccttgttggtagactattggtatcccagaggctgatcattcactacagcttactaaatactgttccataatgccagtgagcacttttacccaggttacctttttcctcccattaatgtggacctgttgtggtctcctgtttctcttaagctatcccagatgagaggtgattatttcttgaatgaatgagattcccttttttttccctctgccatagaatcctcttatgttccttactggaagcaacatggaggaggcagaaatgatggcaagatacaaacatttttcccgccatgtggccaccataagcagcttacaacatgttctacctagaagtcacttactttcaggccagcaggggtgtttttctgtgatgtgtctctttctcttaaaagcacctctgattaagtttagcacaatcaggataatctccattttgataaacacaaagtctacggatgagtaacctaatttcataagtgatttcccaccacagtcacacattttttttacactcaagaggaaagtatgacacagcacgtgtgcaacagactggtaatccagggtattatcttagaatgttgcctacccacctaaataaatgtttaaaatcatcttttgctgggcacggtggctcatgattctaataccagcaccgtgggaggctgaagcaggcagatcatgaggccaggagtttgggaccagcctggccaacatgatgaaaccctgtctctactaaaaatacaaaaattagtcagacgtggtggtgcatgcctgtaatcccagctacttaggaggctgaggcaggagaattgcttgaacccaggaggtggaggttgccatgagctgagatcacgccactgctctccagcctggaagacagagcaacactccatcatggaaaaaaaaaaagagtctttctgctgcttttgttatctacataaacaaagatatcaactggatataataattaactactttttagttttattcattacaaataactatttttctggcttaaattattttttatgcaccatttatacattcacacacacatagaacaataaaaatatatccaattattcaattttggttgaatgttcattcaaataagtgttaaaaatgatttttttttcctgttttaagagggcttttattattgtactcaagagagttgtttctggagacaaagttgcctgtgctttaataggcagactctggggagaatccgaatcacaggccagaacattttatattaataaattcaatacaaagcagaaagtatagatttgctttcaccattttaaaagtgtttagttttgttaatcacctaaataacataatttgttttgttgcagtaattgcttttattctgaaaatatgtacaaacctatactcacacaaaaacactcaattcataattttcttacacctcaggtttatcttcagagtaatatgtgtatatttaactctatgtaaattaaaactaaaagtctatgtgtttgcaggcagagaccacatgttcaaggaaaactatattacaagtatttataatttttcaggactcagaaatgtatggattttatttttattttattttttgagatggagactcactctgtcagccaggctggagtgcagtggcatgatctcagctcactgcaacctctgcctcctgggctcaaacgattctcctgcctcagcctcctggcatgtgccaccatgcctaatttttgtgtttttagtagagacaaggtttcaccacgttggccaggctggccttgaactcctaacctcaagcattccacctgtctcggcctcccaaagtgctggaattacagatgtgagccactgtgcctggccgtattttatttacatttttgtataattattatgatcatagaaataattctgtagtcaataacaatttaattgtacattttaaaatgaataaaagcatataattacactattggtaatacaaaagataaatgctagaggtgatggataccttatttaccataatgtaattactacatattgtaggcctgagtcaaaagatgccatataaggcataaatatatacacatattatatacccacgaatacaaataaaaaatttaaataataaagagtcaaaatttaatctatgggaacaatatttaactcatttgcagtttaaagccactgacagtgattactaaagatgttattttacaatgtatgaaatagtatattcctacaatattgtacctacacccttgagtaaagtgggatacagttagtggcacaataatggttcattaaacgcacggtagtcttaccatggtaaaaataaaataaaattaagttcacaaataatctaacaaacttttttttttttgagacagagttttgctcttgttgcccagactggagtgcaatcgcacaatcttgccccactgcaacctctgcctcccaggttcaagtgtttctcctgcctcagcctcctgagtagctgagattacaggcatgcaccaccatgcctggctaattttttttgtatttttagtagagactgggtttctccatgttggtcaggctggtctcgaactcctgacctcaggtgatctgcccaccttggcctcccaaagtgctgaaattacaggcatgagccatcaagcccggccctaacagttttaaaatgcactgcattttattacataaaagtacaagtagtaaagtaatatactcatttattttaatatacttttaattatttctttgtgtcactataataaagtattgctctgaacatttacgttatacattacttaatagaattttactacaaacagcttctccacttgtattttcattatgcgtcttacattttaatgttcttactattttatagaaaaagtcataatgtccaaataatgtaaaaaaatcgaatatctctgatgcagaagccactgatcacatgctttctcacatgtgaatagaaataaaataacagcataatttgaaagctgtattacatcattattcagctttcaaaaaattttattcaaggaaacaagtatactttcaacgtaattacaatgcttccaaaaatctactccttttaaagttaaatagaaatcatttacctaaaaactgcagttgtggattagtttttatattcaatgctctgatttagtgtaatgtctgaagtgtcggggccttagttattctactgtaaactctcttgatatttatatacaatctattttgaattaaatattttttaatatttactgcatctgcaaaattatattttagcataaactctctgttgttttctaagctgtagtttctggggaaaaaaaagtgtttctaaacttaatacatttgtaggactcatctccaatataaattccctgatgttgaacaaacttgagcaactgctttaggattttcctccagtacaaaatgtgtgcaataagatctgtgatactagtaaatgtactatgtaactccctttatatttgtaatgcttgtcttcacaataaatactcttcttcactttaaaggcttatacttgctgaaagttttgacagtaattgccattttaatgcttttattaaaaggaagatttttatgttgagttagatgtgagtaggaattaataggttttccatattccttctatttgtacaatttttctcaaggatactagcttttctgtgagataaggtgtaagaactgattaaaagttttgccacattcttcacacttgtaggagttttgccagtatgaattatccaacctacaatcaagagtggcaaccatataaaggctttgtcacattttatatatttctagggtttcacactagtataattattgttatgtgtagagaagttggaggtgttcgtaaaagcaatgtcacattttttagctttgcggatttcctcttcaacatgaattattgccatgcctcttaagaattgagaacttgtggctgggcgtcgtggctcacgcctgtaatcccagcactttaggaggccaaggtgggtggatcacctgaggtcaggagttcgagaccagcctggcaaacatggcgaagtcgcatctctactaaaaataaaaaaattagctgggcatgttggaggacacctgtaatcccagctactcaggaagctgaggtaggagaatggcttaaacccaggaggcagaggttgcagtgagccgagatcatggcactgtactccagcttggatgacaagcatgaaacttcatctcaaaaaaaaaaatattgaaaacttgttataggatttgccacattcctcaaacttgtaggatttttgtccagcatgaattatgtgtaagaagggttcagaacttcctaaaagcgttgtcacattctttatatttgtagggtttatgttccatataaattctcatatttagtaaaagttgatagctggttaaaggctttccgacattcatcaaactcacagggtttctctccagtacgaattatcttatgtctagtaagggcagaggtgtccttaaaggctttgctgcattttcttatttgttgggtttctttcccgcatgaattatctaatgtctactaaggtttgaggatgaaataaaggctttgccacatttatcacacttgtacagtttccctccaatatgaattttcttatgtgaaaaaagcatagtgggatagcttaaagctttgccacattcctcacatttatagtttctctccagtatgaattaccttatgtgtagtaagggtagaggggcacttaaagcctttgccacattcttcacatttgtagggtttctctccagtatgaattctcttatgtctagtaaggataaaggagcgcttaaaagccttgccacatcgttcacatttgtagggtttctctccagtatgaattctcttatgtgcagtaaggtgtgaggacgagttgaaggctttgccacattcttcacatttgtagggtttctctccagtatgaattctcttatgtgtagtaaggatagagaagcacttaaaggccttgccacattcttcacacttgaagggttgctgtccagtatggattatcttatgtgtagtaagggaagaggagtacttaaaggcttcgccacattcttcacatttgtagggtttctctccagtatgaattctcttatgtgtagtaaggtgtgaggaccagttgaaggctttgccacattcttcacatttgtagggtttctctccactatgaattatcttgtgtgtagtaagggatgagaagtacttaaaggctctgccacattcttcacatttgtagggtttctctccagtatgaattcttttatgtgtagtaaggacagaggggtgcttaaaggctttgccacattcttcacatttgtagggtttctctccgctatgaattatcttatgcgcagtaaggatagaggagcgcttaaaggccttgccacattcttcacatttgtagggtttctctccagtatgaattatcttatgtgtagtaaggttagaggagcgcttaaaggccttgccacattcttcacatttgtagggtttctctccactatgaattatcttatgtgcagtaaggtatgaaaaccggctaaaggctttgccacagtcttcacatttgtaccgtttctctccagtatgaattctcttatgtgtagtaaggtgtgaggaccagttgaaggctttgccacattcttcacatttgaagggtttctccccagtatgaattttcttatgtgtagtaagggttgaagactggttaaaagctttgccacattctatacatttgaaaggtttttttccagtatgtcttatcttatgtctgtttgaatttgaaaatttatgaatgactttcacatatttatcacactgaaatattttgctttgagtagttgtcaaatattggttaagtccattataacctcttttgtgcaccttacactcatctacactttcacagccctttttaaactgtaaattgtcatgtccatagttttcatatcttctcagtgtcactttttggaaagaatcttttatgctctgctctggccaaagatctcgggcaaaatgagaacacgtaactgaaagaaacaataaaagcacattacttcaattggtagactcagataaatatactttacagatctaacctatataattatacaaactacataagcaagatgacacagcaaaataccacaaactgtaatttcttcctggatacataaatgtaacaaaagtggactgcccaaaatacatttgtaaaaaatttataagtgagttaagtgtatgaagggccccaggtgagcacaatgcaaagagccacatagaataaaaagaaaattctgttacttatacccaacagagctcttcctgctctccagtataatattgtgcctttaaaagtaaatttccagtcggatgcagtcgctcatgcctgtaatctcagaactctgggaaggtgacacatgggtggatcatgagaaattcgcccccatgacccaaacatatcccaccaggtcccacatctaacagtgagaatttatattgcagcatgaggtttgaagaacatagacatccaaaccatattatagaccacctaggattcacagccacacacaaaactctccagtcaaaaccaagataatacacagtattcctatttgcatctggtgtattctgttaggacacatatgaagttttattaaattaaaaatactatgtgctgtagctcttggctataatcctaacactttgggagatccactggggccaaaagtttgagaccagcctgggcaacatagtgagatcctaatactacaaacaagcaaacaattatccagacatggtagtgcatatctacagtcctagatactcaaaaaactgaggagaaaggatcacttgagtccaggaggctgaggttacaatgagccacaattatgccactgcactgcagcctgggtgacagtaagatcttgtctcaaaacaacaacaaccaatcatttttaaaacactaaaattacacactgtgtgttttctaacaaaaactgaatgaaactaggaattaaaagcaaaagtcaaactggcaaattctaaaataagtgaatatgaaatacactctacaacatattcttgctcagggggcaaaaaattttatttttcaaagttgtcaatacaacctacagttaaaacctacagtaacatggccaggcatggtggctcatgcctgtaatcccagcacttttggaggccgaggcaggtggatcacgaggtcaggagattgagaccatcctggctaatatagtgaaaccccatctctactaaaaatacaaaaaattagccgggcatggtagcaggcgcctgtagtcccagctacttcagaggctgaggcaggagaatggcatgaacctgggaggcggagcttgcagtaagctgagattgcgtcactgcactccagccagggtgacacagcgagactccgtctcaaaaaaaaaaaaaaaaaaaaacaccacctacagtaacataaacaatgtgacactgacacaaagataaacaaatgaaagaacagaatagagaactcagaaatgaacccttctgtatatgatcagatgatcttccacaaagttgccatgcatacaaaatagaaataatctcttcaaaaaatgaagttgaaaactgaatatcaacactgataaagttgtttatttccttgaatgacacaataatacattttaaataaaatgcttaaacataaaaatacacaagtgaggaaaagcatttgaaagaacatacaaaatcattaatttatacagaaattaaaaaaacacacaatgacaagatcaacttacacccattaggtgcaataaaaataaaacccatgttgattgctggtggaaaacaaagacacagccattattttaaaatgttgtaaatgttcctcatttataaatctctatccaaaatatgtaacacaggccaggtgcagtggctcaagcctgtaatcctagcagtttgggaggctgaggtgggcagataacctgaggtcaggtgtttgtgaccagcctggccaacacaccatttctactaaaaataaaagattagcttggcgatgtgacgtgcacctgtaatcccagctacttgggaggctgagacaggagaattgcttaaacccagaaggcagaggttgcagtgagccgaaatcgtgccactgtactttagcctgggcaacagagtgagactccatctaaaaaaaaaaggaaaacaacagcaacaacaaaaatatgcaacacaggacctggaagatataattgaaaatccatgtgtattgtaccagtattcacaaaagccaaaaggctgaagcaacccagatgcctcttgatttataaacatatcaaaaaatgtaacatatacatatgatgaagtattattccaccttagaaaaaacaatcttgtcaattttaagatgaactttgagaatattatgtcacctgaactaatccagtgacaaaattttggatactgtatgattccacatatatgatatatcttaagtagtcaaaatcataaaatcagaaagtggaaggtttgtctgtcaaaggctggagagagggtaaaatgagcagttgttacttaatggtcaatggcttttagttttacaagatgaaaactttctaaaagtcttttgcttaacaatgtgaatatacttaacatgactgaaatgaacagcttttttttttgagacacggtctcactctgtcacccaagctggagtgtagttgtacaattttgacttcccttaaatctcccaagtagctggggccacagctgcacatcactatggctggctattattattattattttttatagagaggtgtcaccatatgttgccctggctggtctcaaactgttgggctccatggatcctccagtcttggcctctcaaaatcctgggattacaaataagagcctccaccaagcctggccctgaaatgcacacttcaatagatttaaggtggtaaattttatattacgtgtttttaagcaattttttttaaagaaaaactgaaaaaaaaaaaaaaaaaacaattatgtatctttttgaaatttactttcaaatcatagaagtgtctctcacaaaagcaaatatatattcattgttaaacacatggtgataataagactatctccataagtactcacttagacaagataaaactaccatcaaaaatcagctaagaaagaatataagccataactaaaattggggtcatatttatagataaatacacatacaaatgtaatctgattatgatagatatgcataatttatctcttaattaaaccttaaattgacttaaagtgtacaaaaagaactgcaaattgtctaaaattataatacataagtaaaaccaaaacacccaataaactaatcttaagaaacctacactgaggccagaggcagtaggtcacatctgtaatcccagcactttgggagaccaaagtgtgcaaatcctgaggccagcagttccagaccacattggccaatatagtgaaaccccatctctgctaaaaatacaaaaattagctgagcatggtggctcatgcctgtagtcccagctacccaggaggtcaaggcagaagaatcacttgaacctcggaggggttcaaaacttcaaaacaacaataagagaaatgtttactcataaaatcttgtatgcaacattgaagtataattaaaaaaaaattgtcaggccgggcacagtggctcaaaactgttatctcaacactttgggaggccaagatgagcagatcacctgaggtcaggagttcaagaccagcctggccgaagtggtgaagccccatctctactaaaaatacaaaaattagctggggacggtgacacacgcctgtaatcccagctacttgggagactgaggtatgagaatagcttgaacccaggaagtggaggttgcagtgagccaagatcataccactacactccagcctgggtgacagagtgtgactccatctcaaaaaaaaaaaaaaaaaaattctagataactgcaatatttaactgttggtgtgtactcacaaaatgcaagtattctgaatcattagcatgcactgtgtggcagtaaaatttcagagattatgcagtataattataaatagaagattctaatgagaaaataaattagcatttaaaagaaactagttccttttaatgtcttaaatatatggtattcttacacaaaatgaaactgctgtaatcaaacattggaagcaaagagtacccttacattgttaaataagaaatatatattttgtagaatggggttagaccctctgatatgtaaaacaaatattaggaaataaactattttattatggagatataggctgaaaaaagtagatgaacatcctataattcctttttacctgcagcaaatttaaatttataaataactattttagtaactatgggtgcctactaattatgtaatttacttcaggcatatcatgcaaattctagcatattgtcttcaatatttgaatctaaaattacagacaaatctgaaagagaacatagaaagtaaaaatatatagggagagtgacatcagtaaaatgaaaagattaaaagtgccctattttcatattcccttacagcaaaacaagtcagccatcgctgacaaaaatacctttatgagagaaccaggattatgactcacacctgtaatgacagctccatggaacattaaggttggaaaattgcttcaggccaggattttgagaccagcctgggtctcaaagaccagatcaaagatgtagcaagatgccatttccaaaataagtgcctctaagggagatttgagagctagggtgggagttgtgaaatgctgttaaagcgtaaggttgagaagtgttctattcagaaggcaggctctcattcacgtgggaaactacagtacccctgttcatggctacagaccaggatagggtttacccaagttggtcccacagagaattctgaacttactctgtaaccagctcaaactcccagccacagtctggcagaggtcctgccattccagagacctggatgaaggcacccatttacagcaatgtaggcaggcttgcagactttggcctttactggggtccctgaagaggttcaatgactcagtttcggttacctgagccacagtttatggtcagttctgcctacatagaagcccacacaattgggccgggcggggtgcctcatgcctgtaattccagtactttgggaggccgaggcaggcagatcatctgaggtcaggagtttgagaccacccttgccaacatggtgaaacccagtctctaccaaaaaaatacaaaaaattagctaggtgttgtggtgagcaccagtaatcccagctacccagcaggctgaggcaagagaactgcttgaacccaggaggcgaaggttgcagtgagccgaaatcacgccattgcactttagcctgggcaacatgagtgaaaccccatctcaaaaaaaaaaaaaaaaaaaaagaaagaaagaaagaaatccattgcaattgaagaaaaataagtaaaagttgctgtttgtggatcatacatcttacattttaaaaaccataaacagtacattaaaacctgtctaaactaatgaatacactgagtaaattagcaaaatataaaattaacacacaagtacatgtattgtttcatacgcttaaaacaaactatctgataaaatagaggaagaaaaaatcttatttaatatagcattaaataataaatttctgagaaaaaaattaaccaagaaggtaagaaaatgtttacaataaaaaaatgaaaaaattagaagatccaaacaaattttaaaatattttatgtctagggattgaaagaataaatattattaaagtttcatattatccaaagtgatctatagattgcataaacgtcctgtcaaaattgcagtgttttttttttacagaaatggaaaatacaattctaaaatttacatgaaaataaactctgaatagccaaagcaatcttgaaaaaaaaaaagaacaaagcagaaggatatcatacgtataatttcaaactatatttcaagactataatagtaataaaaatagaaaggactacatagaaaaataaacaaaaaaattggacagaaactactactctcacacatcagacctgatgcaaaaagagaaataattctcaaaatcatgcagatatttgtgtgtccccaaaacaatgaaaaagcagccagactgtgcagtattttatatgccatgaagaggactctggctctcactgtgaacttgaagggagctcaccgaaagaaaagtagaatttttacagaatttaaaagcataagcagaagatgcccctttataagagcaaaatttaaaaaagaaaaaaaaaaaaaaaacagctcccaggaactattttctttggagcacagcttcccaaatcacactttaaggactggctttctctttgactttgggacctcttatctgtgtcgtctgctatattcattttcacttgcacctacctgaggggttggctaccatctcatgtttcttcatggtcaaaggtttttttccttgctccagacaggtgatgaggtctggcttagagacaacaatacctgttttattaaaaataaataacatgaatcttgctcatattctccaattacaagctagtaatgtgctcgcaaagacaatgtaataaaatattatagtaaattaataccaaaatacaaatttataacagaaatttctaaatatttagaaaatactttaaatttgccaggtgcagttactcacgcctgtaatcccagcactttgggaggccaaggtgggtgaatcacgaggtcatgagttagagaccagcctggccagcatggtgaaaccccatctctactaaaaatacaaacattagccaaacacggtgacttgcccctgtagtcccagatactcatgaggctgaggcagaagaattgcttcaacctgggaggtggatgtttcagtaagctgagatcacaccactgcactccagcctgggtgacagagtgagactctgtccccgaaaaaaaaaaaaaaaaaaaagaaaaagaaagaaaatactttcaatttgtaggtttcttaattttccttcctggtactactgaatcaaaaattggtggtggcatttagattttcaggtggaagctacaatagtttatgtcagtaaatttctggaattaccactaatttggagtgaagattacagctcacctcacaaatatggaaaatttggattaagatgaaacatcttgaagaaatttttttcttttctttttttttccccttgagacaaaatcttgctctgttgcctgggctggagtgcaatggcattatttcgactcactgcaacctccgcctcctgggttcaaggtattctcctgcctcaccttcccaattagctgggattacaggcatgtgccaccatgcccggctaatttcttgtacttttagtagaaatggggtttcaccatgttggccaggctgatcttgaactcctagcctcaggtaatacccccacctcagcctcccaaagtgctgggattacaggcatgaggcaccaaagaaattattttctaaatgaacaaattctgaagattttcttgaaaaagtggatctgaaactcttttataaaagaataaattactaaaaaaattctacaagagagagaaataaagtcttttgtgtatattatgaattatgtattaaagtttttctcaccaaggaagaccaggtttctgtagttctctaacatcacattcctatataaattccgctgtgcagtgtccaggcaatgccactcctccagagagaattctatggccacgtctctaaattgcaatggcccctgaaacacacacacaacatacgtttttaccaagtagccaagggtggaatttttaatttgacttaagttcaaatgagagagtaaagacaaatggttctgacttataggactgactaaaattatccaataaaataactttcaacacagaaatattctctaaagtattctctgagaaaaaagaacagcataagatccacaacatcagttcatgtatttttctagatagtaaagtgtaaaattaagggtatgaacacgaacatgtacatttttgagtgctatgtttacatcatatggaatgagctgtgaatatttttcagatgacaaagacatgttgagtttagaaggcacctctaaaatttaaatatatacaataagttgaagaccttgttatgcagggtttttttccagaagatctggaataaagtttgattttttgaatttctaacaagctcaccaatgatgtcaatgtttttggcccaagaaggatattttgtcaaacatccagtaagtggaagagcctgtttttcccagtttttctggcctgtaaacaaagataagagtcttcattttccaaagaaaaatatgtagaaaaaattaagaaaaaaggacaactgccagattaaatgtggtggtttattcacatcagctgcataaagatacttaataatgaagagaaaaataatcagctacatagtgaaaaatatctgtcacagagctatttaagcaagtgaatcattaaccattaacttcactagaagaaatttttatgttgtgctaatgcacatagaagaacacagcatcactgttgaaatattcctcttttaaaaaagtaaataaaatctgattcaatcataaagaaccatcagttttatgcaaacctcaaaatacagataactcctgtgttctgtaatttttagtagtaattttaaatagacttcatttagcaccctaaagagcaggtatgtcctaataagttttttcagaactttctgggtaataaatggcatcccatttaaataagcatttctttttttttttttttttgaggcaaagtctcactcttgtcccccaggctggagtgcaatggcatgatcttggctcactgcaacctccgcctcctgtgttcaagtgggtctcctgcctcagcttcccgagtagctgggattacaggtgcctgccaccacgcccggctagtttttgtatttttagtagagacagagttccaccacgttggccaggctggtctcgatctcctgacctcaggtgatctgcccacctcgaccttccaaggtgctggaattacaggcatgagccattgcgcccaatctaaataaggaatttcttttcttttcttttcttttttttgatatggaaaatcactctgttgcccaggctggagtgcagtggcgcaaccttggctcactgcaacctctgcttcccaggttcaagctattctgctgcctcagcctcctgaggagctgggattgcaggcacccactgccatgcctggctaattttttgcatttttaatagagacggggtttcactgtgttagccaggatggtctcaatctcctgacctcgggatctgcccgcttcagcctcccaaagtgctgggattacaggcatgagccactgcacccggccaataagcaatttcttaatcctgttcggcatacagctaatggaacacactaatggagcctcaacattacatgttctccatctttactaaggaccacagttttccccaatagaacatgagaagttatgatgtagagaatgaagaaaaggctctgggatacagcaaagaaacatttttcagacacctttgactatcgtaagaattttaagaagtacttaaaccaaactccttagggaggagaaacacaagtagagaagtaaaggtttgtgagtactaaacgcatggcagtccagaaggcagagtggacacagcttttcagctgaggcacgtttacctaaagaaaagccttttttttttgttctcctatctcctccttcactggaattccttctcagatgagattctttggacaaattacacctgaatcttgagaatatgcctttaaaggtgtcagtaccacaagtatacctgctagcatgacatcaactggcagaaaaagacagaaaaatccacccatttctgtcctttaaaacagaagaggttcaggaaaaatgagctgctccataaagatgaaaatataagtttctcctttcctgtcctcaggggccctcccctaccacagacaccatccatttctgctacagtaatggaaatatgtgccactgacctgtccctaccaaacccaaacagaacagaccctgtggccaccctttagtgcaaaggtggaacttaacgctcatgaatgtattttgcagccttcatacctgattctggcctcaccttacagtcacataaggcccttcgttaaaacaacatggatgcttccacccagaacaataaacagaagctgtggggagggcacaagagatttctgcaaattggccatgtgatcctaatgagaggcctgggctgataaccactaagctaagcattgcctctcaagctttaacgagctaagctaagcattgcctctcaagctttaacgagcttataattcacttggtaattttagctccactttatgtaatgtgattctgcaggtttgaaaagggtccatgaatgggtgtttcaaaaacaagttccctgtcaatgctgatgttgctccccattggctcattattaccattagtcagagaagcagtcacagcacatagtcccttatacttagcactcttgtcacaaccaaatacttctcatacaaacaaggacaacccatctccatcctaaagttttatattatttgatggctctttaaagtttacagaggaaacaaggcagcaatgtctgaataagtctgtttttaaaaaacaacatgtacacatgtactaatgcactgtttgttaaacaggtactatgtgcacaatagtatgatacagagcactgtgctgggtataacacattaggtgatttaattctcataacacccggggagctggtactaagggtttaatagttttcaagatttagttaaagggcccagcatttttatttcttcttctgtttctctctcatcaattttttaaaattgtacagaataaaagctaaatatagccagatgaaagagatagaaagaaagaggttaatgtagtttagacaattttattctgtttatatttacttttttgtgacttatggagcaactactggatctgcaggaatagaaaacaagtttctaaataaatgtctccgcaagcactggttttaatagaagattaaaaaactaggaccctaaaatacatactttatttatcccatttatctgtttgtggtttcaggaaattgtgagcaccagctctagaaaggcagcaggattcaccagccaaaactttgatctcttctaatcagttatctgaagcaagactacaagatagggtcagacctaaataaggcctccaaaaagggtgaatctgaacaggtctgggtctggctcagggtgaggaccctatgtaaaattctgctctctatgtcactgcagtactaccagttttgttttttctaagcttacctaaaaaaaaaaaaaaagaaaacttaaatcccagagtttctgtaattttagtattttctagccactgccctgtcaactttgtactacattctaatacgcaatttaaacaaatcctttaaggttttctagggtaattttttttttttttttgagatgcagtctccctctgtcacacaggctggtgtgcagtggtgccatctctgctcactacagcctctgcctccagggttcaagtgattcttctctctcagcctcctgagtagctggaactacaggtgcatgccaccacgcccagctaatttttgtattattagtagagacagcatttcaccatattagccaggctggtcccaaactcctgaccttgtgatccacctgcctcggccccacaaagtgctgggattacaggcatgagcaaccatgcccagcttttctagggtaattttattagaaaataaatatgtacatgtagcaaggtaaaagaaatagaaattatatggccaggagtggtggctgatgcccataatcccagcactttgggaggatgatgtgggtggatcacgacctcaggatttcgagaccagcttgaccagatggtgaaaccccatctctactaaatatacaaagattaaaaaaaagatatatataaattagctgggcatggtggctggcacctgtaatcccagctactcaggagcctgaagcaggagaatcgcttgaaccagggcagcagagggcagcagtgagccaagatcacacaactgcactccagcctgggtgacagagactccgtctcaaaaaaaaaaaagaacctataataacaattcttctgttcataaatatgccttcagatgtagacatcagaagtctcaaaaatataaagaaagtggcctaaataaagcccaaggtgttggacacatctatgtattgcaccaaccatatgatgcacaattcaattatttatccagttgctagtctagactaaaagcttctggattgtaggaaaaaagactgctgcatagtttttttttaatggccatataaaatggaagcaactagtttatccatttgggtctccagatcttttccttctttaccatccaagtactaggaaactggagaaactctcatctgggtaccaaccaaagacacctcttgtatgaggggatgaaaaaacacaggatgactcatttcccttacactgagacagaagcagaattaaccactcttatcagcctaacacaattctgctctgaacatcctcaaatgcctcaaagacacccaggtgattgtgagggaatttccagtgaccctgggctgatggcccaatgataagccaggctagagagactcaggctgaagaccaatgcaacagaatagagagcccagaaataatgccaccctcctataaccatcagatttttgacaaagctgacaagggaaatgtgggaagaattctctctttaataaatggtgctggaataactacctagcactatgtagaagactgaaactagctcacttcattacagcatatacaaaaatcaactgaagataaacacttaaatgtaagcttaaaattataagaaacactgcatgaaaacctaggaaataccattctagacacagaaactggcaaagaattcatgaggaagctaccaaaagcaactgcaacagaagcaaaaattgacaaatgggacctatttaaactaaagcgcttcttcacagcaaaggaaactatcaacagaggaaaaagacaacctacagaataaaagaaaatttttgcaaactttgcctctgacaaaggtctaatatccagaatttattagaaacttaaacaagtttaaaagacaaaaccaaacgacctcattaaaaagtaggcaaaaaagatgaacactgcttttcaaaagaaaatatacatgtggctaagtacctgaaaaaaatgctcatcgctaatcacgggagaaattaaaagaaaaaccacatgtggctaagaagtacttgaaaaaaatgctcatcactaatcactagagaaattaaaagaaaaacaacaacgagatatcacttcacaccagtcagaatggctattttcaaaaagtcaaaaaataatagatgctggcaaggttgcagagaaaacggaatgcttatactctgctggtgggagtgtaaatagtttaacaactgtaaaaagcagtgtggcggttcctcacagaactaacaacagaattatcatttgacccagggatctcataattgggtatatacccaaagaaacataaattattatattataaagacacatccacatgcatgttcactgcagcactattcacaatagcaaagataaggacaggccctaaatacctatcagtggtagactgggtaaagaaaatatggtatggtcagatgcagtggttcacgcctgtaatcccagcactttgggaggccgaggcgggtggatcatgaggtcaggagatcgagaccatcctggctaacaaggtgaaaccccgtctctactaaaaatacaaaaaattagccgggcgcggtggcgggcgcctgtagtcccagctactcgggaggctgaggcaggagaatggcgtgaacccgggaagcggagcttgcagtgagccgagattgcgccactgcagtccgcagtccggcctgggcgacagagcgagactccgtctcaaaaaaaaaaaaaaaaaaaaaaaaattggccaggtgtggtaatgcccgcgtgtagtccaagctacttgggaacatgaggtaggagaaaattgcttgagccagggaggttgaggctaaagtaaaccaatatcatgccatggcactctagcctgggcaataagggagactctgtctccaaaaataaaatgaaataaaagatttagtcaaaataaaatatggtatataaacctcatggaatactctgtggccattaaaaaaaaaaatcatgtcctttgcaataacgtcaatgaagctggagaccatcattcttagaaaacaaatgcagaggcctggcgcagtggctcatgcctgtaatcccaccactttgggaggccaatgtaggttgatcacttgaggtcaggagttcgagaccagcctgcccaacatggagaaaagccatctctactaaaaatacagaattagctgggtgtggtgccatgtgcctgtaatcccagctactcaggaggctgaggcaggagaatcacttgaaactgggagacggaggttgtggtgagccgagatcacaccattgcactccagcctgggcaacaaaagtgaaactccgtctccaaaaaaaaagaaagaaagaaaaagaaaatactgtagaaacagaaaaccaaatgcatgtttttatttataagtaacagctaaataataagaacacacaaacacaaagaggagaacaacagacgctgcggcctagttgagggtggagggtggaagactaagagaatcagaaaacatacctgtttggtgctatgcttaatacctcagtgacaaaataatctgcacgcaaaacccccatgcaccaaaacaaactcatgtgtaccccaaaacaaaaataaaagctaaaagaaaaaattaaatccctgggtgggagagattgcaatgtaggtgagaggactgatttttgctacagatagttgtcctggtgcagctgtactctgatttattactgtgtgcacgcagacatatgagattatgaacagctgattcaaaatgctaggttggtggagaaaacagattgctgctgcagatttagtgtctgggggtggggatacgccaggagacttgtagagacttgtgggttcttggcaagaaacactaggatcaaaaacgccgtggtgaaggtcctgagggtggtgcctactcctgggaggagggtggacatgtcaatgtctagtgtgtgtgtttgtgagtgggtgggaatcctgtggtggcagctgtgggaaaagggggtctgtcatcagagctcctttcttctaagttttcagtcctctgtcaccctgggagaagacctggaatcacaggacaatgggcagtgtgacagcctgtgaccagacagcagagctcccattcccaaacacctagagttttattccaggccagacttctgtgatatctttttcctggcaccaaatctgtagagtttgctgaacattaaacaattctccaacaccaactcattgtctaacatttgaattctgacaccaccgagagtcaacacagaccctgattcagggctcagtcccacaacactgtcctcactgcagatgccaatcacaaaccccatgggcttatctatgcttctgagctactgtttaaaaactggggagtcccataacctccctgaagttcaataatttggtagagctactcacagaactcagcaaaccactgcagtgatgtttaacagtttaatatataagatgcagcccaggaaaagccaaatggaagaaatgcacagaacgaataaaagagatggggaaagatgaaacacacagataatcctggaaaatatttgtgattaataaaattctccatcttttgtgtgctccaggaacagtttatggaaagaaacactgttcccattatgacttagtgctctcttttcttatctatcacacaggcacacacacacactgcacattttctcctttttctcattaaaaaaatcagctgaatttgtcttcagcgctcaaaatatttcttcactttgtcacccaggctggagtgcagtggagcaatctcagctcactgcaacctctgccttccaggttcaagcaattctcctgcctcaccctcccaagtagctgggattataggcacccaccaacacacctggctaattttttttttttttttttgaaatggaatttcactcttgttgcccaggctagagtgcactggtgtgatctcggctcaccacaaactttcaagccatttcccaggatcaagccattctcctgcctcagcctcatgagtagctgggattacaggcatgcaccacaatacctgatttttctttttctttttttttttctgtagtagagatggggtttctccatgttggtcaggctggtctcgaactcccgacctcaggtgatctgcccacctcagcctcccaataatttttgtattttagtagagacaggatttcaccatgttggccaggctggtcttgaacacctgacctcaggtgatccgcctgtctcagcctcccaaagtgctgggtttacaggcatgagccaccacacttagcctaaaataaaatatcccttaatcgaactcttcttaagcttatctccctccctcaggctcctgaactttgagctaccctcagtctgagtcagcatacaaccccattttatgtccctcctaagaacatgctgatttcagggtaagacatcctctgatctaaaatatgactttttcactctccgtttgccattcacctcccacctcctttctaatcttgtttgctcctccctaaaaaagaaagcccttttctgcttacatctttgcaagccataaagatcttaaattagttggtattttctgctgttgcaattttttttggaattcatttttttaacataaattaatattttttattttacaaagtgtagaaagtgccacaaaacataacaacttcatcatcaataagaccctctaagtttcctttcatcttaacctcagctgcatctgcctgtggggccccagctttccagggctctgtagcttctctcaggataaagcctccttctatggctggggtgagcaggctgggacatgtgcaggggaggctccccagaaaaaaactgagtctttagtaacatcctgttgcaggcttaatatcagccttagcttggagtcactaggttcaagctttgatttccatgtcagagttattcacttggtttttgaaactaagtgttagaaaaatccagggaaattactcaaacacagtgtttacataagaaggaagtgcttactttttttttttttttttttgagacggagtcaccctgtggcccaggctggagttcaatggcatgatcttggctcactgcaacctctgcctccccggttcaagaccttcttgtgcctcagcctcccatgttgttgggaatacaggcgtatgccaccacacccggctaatttttgtatttttagtagagatggggtttcatcatgttgggcaggctggtctcaaactcctgacctcaagtgatccactcacctcggcctcccaaagtgctgagatgacaggcgtgagccactgcacctggctaaggtgcttgcatgtgatacctccataagaaaagtaaatatatctacttctttcagaaaatatatgtattattttattatttatcttaaaaataagtaggcctggtgcggcaaatcatgcttgtaatcccagcactttggagggccgaggcaggtagatcacgatgtcagaagatcacgaccattttggccaacatgttgaaaccccctctctacttaaaatacaaaagaattagctgggtgtggtggcacgtgcctgtaatcccagctactcaggaggctgaggcaggagaattgcttgaacccaggaggtggaggctgcagtaagccgagatcacgccactgcactccaacctgttgacagagcgagactctgtttcaaaaaaaaagtaaataaataaaataatgtagtaaaaaattagtcatatgggaacacttctagaaggtaccatgtttcatcacatataatttagcatttaactcagaactcaacaggatatagaactgagatattcactgtcacaaatttcccctgcaaaaagaggaactaatgtgttgacgaatctatgtaactcatcaattatctaccacattttcctgtggaaatatattcattgtctacagccaaaatggaagagagattttccctatttttttccttggtaactagcattcctggctaacatactgaaactccatctctactaaaaatacaaaaattagctgggcgtggtgtcgcgtgcccatagccccaactactccagaggctgaagcagaagaatgcttgaacctgagaggcggaggttgcagtgagccgagatctgacactgcactccagctctggcgacagagcgagactccgtctcaaaaaaaaaaaaataaaaataataaattgaggaacatggggtacacttgaggccttgcttgagacacatgtggaaaatgccagggaaaatcagtccgctgtggcgtgtgaaaataattaagtggcaggcaattagactgaagaagctctagtccctggatttctacctcaaaaaaaaaaaaatctaagctcatgtgcattttttgggaaattactacattaggggaaacaaaattcaggcttaagcaactataaactgccaattaaactgtaattacataaccaggaattttttttttttttttgagacggagtctcactgtcgcgcaggctggagtgcagtggcaagatctcagctcactgcaacatccacctccggagttcaagcgattctctcacttctgcctcccgagaagctgtgattacagacatctgtcatcacacccagctaatttttgcatttttagtagacatggggtttccccatttgggccaggcttatcttgaagtcctgacctcaagttatccgcctgcctcggcctcccaaagtgctgggattacaggcgtgaacgactgcgcccggccccataaattttgaatagcagaaaacagaaactgtgaactccacggaccaaagctcttcccattcatgaacctgcaccccgagtcaggattctcccctgacgaccctctggtggtccctgcacattctgggagagacgggaggctgcggttgcagagctgcccacggagcgctccaggccagagcagtcactacgcagggaagacacaggacgccagggggcccggctgtcagcgtagccgccaaattatggctgaacgggactgaggccgagctgggcaaggagaactcagggtgcagattgtggagctgactgcgcagaggcctgagtcccgccacagccacttcccaccggttccaaccagcctatccccctctctcgggatgtcggaccggcactctcaccatttctaggcttccaggggctcccgggcgtcttagctgtggatctcccaatacctgcaggacacagggccacagaggctgggcctctaggagcagaggacacacagcagtgaagacaagacctggagctccggctgcagagacaaaggccccgcaaaacccggaagccttccgcttcactctggctgcgtgcctgattggacggcttccagcccagcgtccctgattggataatgcttaaatccccgccccctcaggccctgagtgacagaagatatgatcagatgctgggttaagtgaacaaagagtgccagcctaagcagctggcttttcaaacagtgcttcctccctgagctgagccaggcccaccccagagcatgggaatattttatctcttgtttactctctttcttgttgaatgtattaaaaaggtgaacagaagtattttgctgtcattaataatacataaaatttttgttcaacagaaaatcaacttttactttggtaatggtaaaatctattaaagctaattttaataaaaccttataaataaatcaaatttgtcatttttgagcactccagatttacatatatattttgtaatatctcgtaattttaaaaaactatttatattttatttttgtccacattctttttattttttcaatttgaaacaatctttaatttccaacagctataggagatagaaatcatttagaggcaggcacggatagttcacgctggtaattccaacactttgggaggccaaggtgagcagatcacttgaggtcaggagttcaagacaagcctagccaacatggtgaaaccccatctctaataataactaataaataataataataactaataatataaaaagttacctgggtgtgggggtgcacatctgtagtcccagctacaccggaggctgaggcaggagaatcacttgaagccaggaggcggaggttgtgtaacagcccaaggggtttattttaccctttgcctagacagagccgattcatcaagacaggggaatttgtggaggaaaagtcacatattaaatctgaactcaattgaatgtggacacaaacaattgtcaccaagtcccagaacaggttgtgtgagcccctgaggtgttcatccagcgctgtattgaagaaatctctatttcaatctattcctatatattagttgttgaaaaacaatagacaatcacaaaaaaaggttgacctttttgtgttccttgaggcaagtcgtgaagggctctcatcactgggccttatgccaaacaactcgttacaaaagagctaaggtcccagaccgccctgaagcttcataagacctctccttgtctgtgtacgatggacgggtggctgactctagagctgtggctgttgcctccctctctggtggtgaatcccccatagtctggtgagggaaaatatatatatatatatatatatatatatatatatatcttttcccatttcctcgtcttattaagattggcttattacatcaatctgcttattatatttatttgcttattatatcatttgcttattatattattactttattatgtctgcattgccatttacgtgggataaaagttgtttacccttaatggtattgtgtgtgtgtctttgtttctcccctctcacatttgcctcacagaacatttttggcatcacaaataggatttgaaaacaaaagtgtacccctttttgactagaaggacagggctggagggctcagggacttcccatatcctgggatgggaactcccccagttctccctcttggtgattaaatggtcaaggggaactggtttttgtgggaattgggaatctaaattagtgcagtttaaacctttgactgtgcgggaagtgctgcgggggattccagtcagcaaaggagatgctgagggatctcccggagtggatggtgtttgcttactgcttataagttaatgtatcgtgataggggctggttgctacaagataaatgtaagcggaaaaggaaaatgctaatctgacttccagactggcccaatgccagtcaatgtcttgactgataaagctcaaagctatcagcctatcgctgaaaaaagcagctgtccaggtggcccagtcaggataaaactgaagaactagtcagccggggcttcgagcaggtaaaaacccagttcctatttcaaaaatgggaaattaaccctagtaaaattcaaggacctgcacaaagtataaaattccttggcattttatggaatgcaaataaatagtccattttaccaaaggctaaggctaaaatactagattttgcaacccctaccactaatgtactggcttgtttggtttctggagacatcatattccccacttgggtaacattttacaacctctgcatgcagccactagaaaacgctatgactttcactggggagagaaagagagcatggcctttgaacaagctaaacaagcagtgcaactggccctggatctatggcccatacgggatgggccagtagaactgcaagtaactgtcctagatcaatatgctaattggagccttgggcagaaacaagatgggaagagggtacttttcgggatttggacccagaaaccaccagagggaggaaaagcttatacctctttcaagaagcaactgttagcttgctattgagctttgctggaaatagaacacctatgcttcaaccatgatgtttttatgagacctgaaattcctattatgacttgagacatgagttcccccaaaacccaccagatagggcacacccaagaaagtagcatcatataatggaaatggcacatacaaaaccagcctaagccaaaaccaaagagggtatcactttcacatgaggatggacaaaacttgccagctcaggaaacactgaacgagtcctgcagatagagaggtaaacacccccctccccaaccgcccatcaaatgggatcagaaacatacttggtttactgatggacccaccaaatacattggtgggacccaatgctggaaggctgtggcttataatcctcttaaatacataagcatttctgatgaaggaaggagtgggagcattcagttagctgaactggcagccatcctctgagctattcaggaggagaccagagggatttgtcacttgtatacgaactcttgctcagtagcaaatggtcttaccacatggatgccccagtggcaatgaaacaaatggctaattgggaataaagaggtttggcgagaacaatgctggtaaggtatctgaatcctggtgcacaacacataccactgtgttccatattgtttgttgttgttgttggttttttcctagccctgtcaccaaactgaagtgcagtggtgcaatctcagctcactacaacctctaccgcccgagttcatgccattctcctgcctcagcctaccaagtagctgggattacaggcacgggctgccacgcccagctaatttttttttttttttagactcagtctcactctgtcgctagaatggagtgcagtggcgtgatctgggctcaccgcaacatccacgtcccacgttcaagtgattctcctgactcagcctcccgagtagctgggaatacaggtgcgcaccaccatgcccagctaatttttgtatttttagtaaagacggggttcatcatgttggccaggatggtctcaatctcttgacctcatgatccacccacctctgcctcccaaagtgctgggattacaggcatgaaccactgtgcccggccctgttttccatgttgatgttcatgcatctctgctttctcttgacagactatttaatcagcaggaagatcaacaggcaaaaatttccaccataactgcgatcttgaatgtgggtaaatggattacaacatgttcaagccttgcaatgagaggcattatagtgtatggtggtataactgatagggattaccagggagagttaaaggtcattttatacaataacactccagattcttttgctataaaaccacagatgcttgttgctcaattgttagtggtaccttgtgaacaattaacccctgaggaaatctttgtccaacagagtctacatacagaactgggggattcagatcccctggtacaggtagcttaaatcctggagtcaaaatatgggtacggcgtccctcagatcccaaccctaaggctagtgaccttgtagctatgaaagcagaaaaggaaggcatagtacaatttcctaaagatgaaaaacaatatcatttcccctctgtttttgttattacagggaataacctatctactaatggtcagcacctgtgtctttgtgtctgaggccaagaataaattcatcaactttttagccaccgctgcaacagaagccaaccacaatcaatgttggctatacgtcgagttgcaggaggatgccaaaaatggctaccttggagaatcatccctgacaacatttctgaatggctatattgttaccaatgggccacaacaacaacacttgcaatccaacctgggcttcctttgaccacactaagcgatctatctttgccaagtcagacaaaaggcgaactcctccctcaccttgcatcaaaagccttggtattctgcccaatattcctggaatggtatatactacaaacctgctgtgctggtggctggattccatacaacctctgctttgtctggaggccttaaatggatcctctaatgttactctggggtttctccagtcacgtgtcaacacatactccaaatcaacaacattatgcccaatgaaacacaatctctttcctatgttaataagagattagtacactatgattacagtagctccattgctgtcccctggggggccctctgggtatgcagatcctatgggtggcgatacgtgcccctactttggatggggagatgcacttgggggtggacattaattccattcactatccgggaaaatactcccctctccagtaatctagatgcttagaaacattgctagttacaaatgtgctggactccctggtggtggtaccctatcacagtattctcccctgccactggtacaatcttgcttcaccaacaaattataatacttagcttacctgtagaaaatgctcttaatgctagtagcactcgacttatgttgttaccagatgaatttgctcagctgcatactgttgtgttgcaaaatcaaatggcattagatatgcttaccacagcccaaggaggggtttgcgccttactgcatactggatgttgtgtgtatattcctggcaagtctcacaatattactctgtttgcaatgccatgttgggtctaatttttattaattgtgcttctaattctcctgtgcttaccctgtatctgtaatctatatcaactataccttcccgatgtatctgtgagggtattttaatacaattgagtatccaattgaggccgaatgtagtggaaaagttaaatattaaatttgaactcaattgaatgtggacacaaacaatggtcaccaagtctcagaacagattatgtgagcccctttaggcattcatccggcgctgtttcagagaaatttctacttcaatctattcctatacattagttattgaaaaacaatagccaatcacaaaaacaggttaacctttttacaggtgtgagccaccatgcctggccttggatggggtttttgtggttacttttttgttgttgatgctgttgttcctttctgtttgtttttctttcaatggtcaggtctgtcttctgtagggctgctgcagtttgctgggggttcacttcaggccctattcatccggttcactcccgtgcctggagatgtcactcaaggaggttggagaacagcaaagaagagtctgctccttcctctgtgatctctgacctcaagaggcaccaacctgatgccagtaggatcactcctgtatagggtgtctgacaacccctgttgaagtgtcaccagttgggtggcatggggagcagaacccatttaatgaagcactttgactgttccttggtggaggggggtgttttgctggggggaaacccactcatctgggctgctcgaattcctcagaactagcaggaggaaaggctaagtctgctggtccacagagactgcagcctcccctccccctaggggctcaggcccagggagatcagagttatgtccctgagcccctggctggagatgttggagttcctgcagggaggccctgaccagtgaggagagatgggtcagggtcaggcctgaagagacattctggccacagtctgccacagcccatgtgttgggctgtgggggacacctcttgagaccaagctgtccagttttcctggatctagcagaggaaaagtgaggccaggagctatagagatggctgcttccctttccccatccagggaccttagcctgttaggcagtttcgagtcccagtgctggctgctgtccctccctcaaggagctcaaacagcttagacagcagccaactgcaacggtggtgctggtctcccccaccgtgggaactcggcaggcttaagcagattctacctgacaggctgttcataatctgctcagctccagggctgtgtcaggcataataagttcctcttcaaagggtaacttccttgttgtttgttctcaaaatcaacttccttataccttcccgctcctagctacctgctatgtaaacatctcttctccccagtcgcaatccgtaatccacatctcttccttatttggaagaagtcctcctcactcctagttacctgctctgtaaacaaccttcctgccagtctcgatttaaaatagccgtcgagttagctccagccaatgggggcagcacgcagaagtagggactgtgttagggataaaaactccttccctcccttgtatgctgtgctctcacaacagccagagacatgactggcacccttctgcagaagtaaatttgccttgccttgccttgctgagaaattccttgttttctttgcgactctgagctcttgtttccaacagttgggaccttaggctccagtggcgtgggttcatgagtggaatcttctaatctgtgggttgcatagttccatggaaaaagcacagtttcccaggatgggtagcaggctcactcaccgcctcccttggctattgggcaagggctccccaggcccatgtgggtgtcaggtgggctgccacaccacactgctcttcctctccatggatcacgccatccacctagtcagttctgatgagaggacctggatacctcaggttatggtgcaggattcacatactattatggttcttttctatgggatgctgcttctagtcagccatcttggccctgccaccaccaatttttctttgaaaggctaatagaattcagctgtgaatccacctggttctgaacattttttttggttggcaattttttgaaattatttcaatctcacttcttgttattagtctgttcagagttgttgttttttaacctaggagggttgtacatttccaggaatttattcatctcctttaggttttctaatttgtgcacataaaggtgttcacagtagccctgaatgatcttttgtatttctctggcattggttgcaatatcttctgtttcatttctaattgagcttatttggatcttatctcttcttggttaatgctgttaatggtctatcaattttgtgtatcttttctaagagccagcttttcattgcatttatcatttggattttttgttgttgttgttgtttcagtttcatttagctctgctctgatctttgttatttcttttcttctgctgggtttgggttttcttgtttctctagttccttgaggtgttatcttacattgtcagcttatgctctttcagactttttcacagaggaatttgatgctatgaactttcctttcagcaccacttctactgtatcccagacattttgatcggttgtgccattattaatgttcagttcaaagaatttttaaattttaatcttgatttcatccaatgatcattcagaaacagattgatcataaatttaattttttgtttaatttccttgtatttatttaatttctaaaatgtatttaattttcatatatttgcatggttttgatagttcatttagagttgattttcaattttattccactgcagtctgagagtagttgatataatttgcattgtcttaaatttattgtgacttgttttgtggcctatcatgtgtctatcttggagaatgttccatgtgctgatgaataaattgtatattctgcaggtgttgggtagaatgttctgtaaatatttgtcaagtccatttgttctagagtatagtttaaggccaccgtgtttttttgtttttattgttgactttgtcttgatgacttgtctagtgctgtcagtagagtattgaagttccccattattattgtgttgccatttatctcgtttcctaggtcttgcagtaattgctttatgaatttgggagctccagtgttaggtgcatatatatttaggattgttacattttcctgttgactagtacttttatcattatataatgtccctctttgtgttttttattttttacctgtttttgctttaaagcctgttttgtctgatgtaagaatggctactactgcttgcttttggggtacatttgcatggactatctttttccaaacctttaccttaagtttatgtgagtccttatgtgtcggttgagtctcttgaagacagcagatattttgtgggtaaactcttatctattctgccattctgtatgttttaagtggaccatttaggccatttacattcaatgttagtattgaggtgagaaggactattctattcattgtgccagtagtttcctgaataccttttatattgtgttattgttttataggccttgtgagatttatgccttaaggaggttctatttcagtgtattttgaggttttgtttcaagacatagaaccctttttatcagttcttatagtggcggcttgttagtagtgaattctctcagtatttgtttgtctggaaaagactgtatctttccttcatttatgaagcttagtttcactgaatacaaaatttgggctgatacttgtcttgtttaaggaggctaaacataggaccccaatcccttctagcttgtagggattctgttgagaaatctgctgataatctgatatgtttttctttataggttacttgaggcttttgtctcacagctcttaaaaatctttcctttatattgacttcagataacctgatgactgtgtgcctaggtgatgatcttcttgtgatgaatttccttggtgttctttgaacttcttgtatttggatgtctagatctctagcaagtccaggacagttttcctcaattacttcctcaaataagttttccaaacatttaggtttcacttcttccctgggaacaccaattattcttaggttaggttgtttccataattccaagcttcttggaggtttggttcattttttaaattcttttttgtcttcgttagattgggttaattcaaaagccttgtctttgagctctgaagttctttcttttacttgtttggatctatttttgtaattttctactatgttttgcatttctctaagtgtgcctttcatttccagaagttgtgattttttttttatttatgctatctatttctctggtaattgttttcgtccatatcctgtatttaaaaaaaattctttcagttagtatttatctttctctggtgcctctttaagtggcttaataatggaccttgtgaattctttttctggcaattcagagatttcttcttggtttgcatccattgctagggagctagtatggtctttcaaaggtgttaaaaaatccttgctttgttgttaccagattgtttttttggttccttctcatttgggttttctatgtcagaggaaagatctgaggctcaaggggtgctgttcagattcttttgtttcatggggtattcccttgatgtgatggtctccccttttcccttgggatggggcttcttgagagccagagtgcagggattgttattgctcttctgggtttaaccacccagtggagctactggtctctgggctggtactggggagtgtctgcaaagagtcctgtgatgtgatctgtcttcaggtttctcagccatggattctaccacctgctctggtagaagcagcaggggagtaaagtggactttgtgagggtcgttggttgtagttctgtttagtgcactggtttttttttttttttcttttgaatgctagttgttctagcagtgaagttgtcacgtggaaagactgaggaggacttctggttagccaggatgttacaggtgatggaattagctgttgttttctcctttattggagtggggattttttgtttgtttgtttgtttgtttgttttttgagacagagttttgctcttgttgcccaggctggagtgcaatggtgtgatctcggctcaccacaatctctgcctcccaggttcaacggattctcgtgcctcagcctcttaagaagctgagattacaggcatgcaagaccaggcctgtccaattttgtatttttagtagaaactggatgcagtttctctatgttggtcaggggggtctggaactcctgacctcacgtgatccgcctgcctcagcctcccaaaatgctgggattacaggtgtgagccacaccacctggatggggttgttctttgatgagttgctgcaatggcttgagttggttgacctccaacctggaggtgggattttcaatagagcatcagctgtcgtagtatgggggggatgcaagcttgccatcaggtcacctggataagtattcaggtttctcaggcaatgggtgggaacatagagctcccaagagagtatgtcttttgtcttcagctaccagggtgggtagagtaagaccatcaggtgagggcagggttagacatgtctgagctcagactctccttgggtggggcttgctgcagctgctgtggggttgggagtatggttctcaggccaatggagttatgtttccagggggattatggctgcctctgctgtatcatacaggtcaggatggaagtgaaggaaagccagcagtgacaggcctcactcagctcccatgaagccagcaaggccagtttcactcacaccctacccaccaacagcaccaagtttataaccagtccgtgagcagtactgagatcttgccccaggctataagcctccccattgagaaagcaacctgggctttcaggccccacccctcaccacctgccatggcttctgtgcccatatctgtgcttcccattcactgtccccgtgccaattttgccaaggaacattgacactaggtcaaaattcttacagaatttagctggaagtttccttctccctgtggcccttccccaattccactggcagcctgtcccaaggaccactgtgagataaagtcagaaacggcttccctgaggaccaagagtgcctattgggctattcccactgcttcttctgctttcatattttgcttggctctctaagttcatttcagccctaggtgaggctaaatccttctctggtaatctggattttcaggttttgagtatgtgtgtttagaggtgaatgttccatctcttacacttttggcacttgctatttttcagtcatctcgcagaggttgcagtggcaagccacttctttcaaagagtctgtgcattcttttggttttcctggtatgttcctatggtagttcttggagcaaaagttcatgatgaaagtctccacatgctgttcagtccatccaagtgggagatagaaggtagttctgtctcctagccaccatttgtttttcttttgccttctgagatagaaatattgattgactcttcatcacagatacaaaaaaaaaaaaaaaagatcagtgagcattctttctttattgttttaaacagcaatctactttttcttcgggctactgatttaatttctcattatacatttatttatttatttatctgtttcttactgcctgtgctcaccactagaccagctgcaaaaaattcaactacagaaatataaggtaagtatttcataaatgattctcattaactataaatccacaaaaatttcatgttcacattcatctgactggcctcatttggccttctacagaatgtttgaagtttgattaaaaataatctactgataaatatttattgatagaacactgaaaggtgaagtctactggtgaaaacattgttccttcattaccagaaatgaagtagatacatttatttcttgacttactattatgcttcattagtgtgtgtttatttttattcagtaccatgctatttgctttctgtagctgttttttgagacagatttcactctgttgcccagggtggagtgcagtggctttattgtggctcactgcagcctcaacctcacaggatctagggatcctcccacctcagcatctcaagtagcagaaactatgggtttgtgccattacactctgctaatttttgtattttttgtagagatggtgttttgttatgttgctcaggctggtctagaactcctgggctcaagcaacccaacttggcctcccatagtgccaggatcacaggtgtgagccactgcacctggccttactgtagctttgtaatatattcagagactaggtagtgtaatgcctatagctttgttgtttttcctcactattgcttaggttattcttggtctttcatgaattgataaagatttgataattactttttaaattctgagaaaaatataattggaatttttataaggattgcattaaatctatagatcactttgggtagtatggacattttcacaatattaattctttcaattcatgagcatggtgtatttttcaattttttagtgccttcaatttatttaattaatgttttaagagtttttagtgaacagatcttttgcctctttgaataaatttatttctgtgtattttattctttttgatgcttttgtaaatgagattactaatctcaatgcctgtctacacatctattcaaattcaacagatttagagatgaaaccaaatacatgtgaaaatgcaggagaggaaagaaattcaaagttttatagttttgtaaaatacaggtgcccaatttagcatcctgtgtcatgccctgtggtgacaagcatcgcattaagcttaaacttaagctcaaattgacttcttatttgggataacccaaagatagagaaactcatcatcctgattttacacaggtggagactgctgcttagaataaatgaatatacagaatcacatggctggtacatggtaacctggaacttctagaacaaaccatctgagcctgaacttgaaatgagctgggcagcttcttaccatctgtctatgaatagtccagagataccagagggtgccctttgagcctttggtgaataggtgaaaacttcaaatgttgatactcaggaggaaggagttagattgacccaacacttgatggaacacttatttttaacttaatgcagccataaaagtgtttataacacttggggctttgagttcttcaattaaggaagaatttctatagagtatacttttccctataaaatgtatttagccattgataactctatgtagctctgtgaaatatgtgcttattagacagatcaggtgttttggctatgaataagatgaataattgtgtttgaaataaaatatatttataaataattttgattctgaatatttaaaaactattaactactgtttgaataagtctttgtccaaaacatatatatatatacattttataaaatatatagaatatatgtatatatataaaatacaaacatagataatcatatgtaatatagatggtaatataactgtaccttctgtggctattatgagcttcactggtcaccagctctaggatatggggcatcaggtactcaagagtggcagcaagaaacgtaagcatggaagagtccaggcactgggcacagcagatctcccacaagaggtgtccaaacatatcatggagaattgcagctctgctcttgctaagaaggtgagtctacttttatttatttatttatttttagacgaagtcttgctctgtcgcccaggtgggagtgcagtggtgctatcttggctcactgcaagcttcacctcctgggttctagcgattctcctgcctaagcctcccgagtagctcggactacaggtgtgtgccgccactctcagctaatttttttgtatttttagtatagacggggtttcaccatgttggccaggctggtctcgatatcctgacctggtgatctgcctgcctcgggctcccaaagtgtttggattacaggcatgagccactgcacctggcctctttttttttttttgtgaccgagtttcgctcttgttgcccaggctggaatgcaatggtgcgatcttggctcacctcaacatccgcctcccaggttcaagcgattctcctgcctcagccgcccaagtagctgggtaggctggtcttgaactcccaacctcaggtgatctgccggcctcggcctcccaacctgcggagattacaggtgtaagccaccgcgccctgcttttttttttttttttttttagacagaatctcactctgtcgcccaggctggagtgatgtggcaccagctcagctcactccaacctctgcctcctgggttcaagtgattctcctggctcagtctcctgagtagctgggtagctgggattacaggcgtgcgccaccacactcagctaatttttgtatttttagttgagacgagttttcaccatgttggtcaggctggtctaggactctcaacctcaggtgattcgcctgcctcccaaagtgctgggaatacaggcatgagccaccgcacccggctcaccaagacctttaaatgccactggtgtcaacttggccatgataaagcctgggcctagaaatgcccatgattaaaatctggtcactctaatgactgaaccctctttttaaagaaactgtagctattcagttgactttttgttgtagacaaaaatgtgtcatcaatagaatattttgccctgtctagaggacaccgctacagattatcagactctagccagtactctttgagtgcttttacaactttttgtaagttttaggtcactgaaagacattcacaatgtcttgtccagtagagtgtcaattgtttcttctcttacagtacaataatatgagtctccctccattaacatatttatttaattatttccaatttatattgcttttgctgtacatttgatttttttttttttttttgagatggagtctctccttgttaccctggttggagtacagtggcacgatctcagctcactgcaacctccatctcctgggttcaagtgattcttctgcctcagcctcctgagtagctgggacaacaggtgcccaccaccacgcctggctaatttttgtatttttagtagagaccaggtttcaccatattggtcagggtggtctcgaactcctgacctcgtgatctgcctgccttggcctcccaaagttttgggattacaggcgtgagccaccgcgcctggccatttgactcttttttgtactggctctcatatcggctgattcctcagatgttaaataaatattttaatatgtgttcccatctttatgagtgtcacgaatttataatttttttaaaattatgttttaagcactttttatgtcacactgatatgcccaatggatttatctaccaaaagcatccaaacttctatgacagagggttacacagttgaacctgggtgtttttatttgaatatctaggtgactaaagcttcagtagaactttgtggactctgttttcattttagtttcaattttcctttcagctaacttagtgtttctgtgtttttctgctgcatttagagcatattacctagtctttaccattggcaacagtggcttgaagtttgtttataaaattatgtttatcgagataaaattcacataatatcaaattcaatatattaattattttcaggtttacacttcagtatctttttgtgtattcacaatgctttacaatcattagcaataggtaattttagaacagtgtaattacccaaaaaagaaaccccacacccatcaagcagccactttcaattttccccactggcctctggcaaacattaatccactttctgtttcaaaggatttgcctgttttgggaattttatacaaatggattcaaaaaatacatgaccctttttgtatagctttttccatcaagcgtaatgtctttaatatgtatccatgttgtgtgccatattggcacatcattcctttttctggcggaatactattgccttgtatactacatcacatttgtctatctagtcctccatggataggcatttgcactgctctcaccttttggccataacaaataatatttctacggacacgcatatacttgtttttgtgtggacctattttgatttccgttgagtatatactcagaagtggaattgctaagccatgtggtaactctatgctaacctcaggaggaactgccaaaatgttttccaaaactgctgcctaattttgccactgcaccagcactgtatgaaggtttcaatttccccacatcttcacccacactgatctgtcttctgaaatatacctgtaccagcaggtgtgaggtgatatatcactgtggttttgacttgcatctttctagtgaataaagatgttgtgcatcttttcatgtgctcattggccacttgtacagaataaaaatcttggagccactggtccagattatgagtctcaaacacatgttacaaacagatttttgatgctgcacaagaaatagcactcagcaaggcaaatttacttctatagaagggttcacctagtaaattaagcaatgacaagggcgcatagaacaaaggaagcaggagtttttattatctccggtgcagcttctacctgtgtctttcccctattgcttaggtttggaccacacagtctaaactagtcctgattggttaaatacttcaaactttttagatatggtaatcatgtaagggaggtaagagagaatggaggtccattgggggggaactaggaaagcaacctgttccctaataaggaaaataatgcagattgggacttagattgtagcaagttcatgcatgtctaggcatagttaggtaagttggggcacagttgaggtaaggaatagttggaattatagaatagagaatggggaaactggataagctatttgaagagggaacataactgtgtcaaacacaaacaccatggaatgacgataatgttgtacatagtaatctggtaattctgttattatccaatgaagaacagtatcttaaatcttttttctttgtattgtttttgctgtccaatttgccaatcacatgcatagaaaaaatggtatttgtcagtgtatttcctatccaggacaagatgttggaggacccaatgtatttgggagcttgtagtctcaactgtgcccacctggagttcatggggctgataatgatggctggaagacactcaagaggcagatggtggtaatgtacacacctctgcccactctgtgaacatagaaaacatgtttgcatgcactatcactgaggaaatgcttgaaattaaaagaagtcattgtctgtgaagctgctttggagaatatgaccaagatgttggctatagccaggtgcttgagaatcaaatctgtggactttaatatccacctggtataacaaagtggcaaaaaaataaattccccaataatccaactgttgtctgagaaaagaagattattcctatttccaaattcctggaggccattcattattttccaattactaatatttttattcggagtgagaatattctgcataggcacataaggtctgttttattgtggcaactaaaaaggattattgttcacataccactgttttcaacttataattttgtttttaaattctacttttctttcactaagatgtttttctattatctctatatatacatatatatacacacacacataaattcataaacacacacacatatatgtatatataaattatttgcatttagcctgtgctttttaaaataaattccagtggttgacatctagctcacatgttgtcaggcattttccattttagtaatttaattttcatctatattatttcattgaaatacacttgaatcaaatatgaaactttaatatgaaagattccattggcttttcttgcaaaaacctttaatatgaaagatgccattggctttgctttattattataactatatatagtgtgataactttatatatatatagcattataaaactactatatttgtgtgttacatataatttttacaacaactctattaagtggtttattattctgattttacaggtgaagagagcttagacaaaaatagaaaaaatgacatttccaaaattaccttcttgtaggaggcagtttcaggagttgaagatgcttttaactattatgctgtctcaatatcagatatatttttttaaaaaatccacgtattttaaaaacatttctgtatctcttgttagttttttaaagaatgtttgtacatatttatttaaaattgcaatatgaaatattaaaatttaaatatgattgcataatttattggcaaatatctataatgattcaaagattcaagtagaatattaatgttctgatttagcatcatcttaagtggaatttatcgaatgcaaaaattatttcctcttggaattaaaacagaagattttttcaacttaaccaagaaggagacataatggaatggctattaagaaaaggagcttgaggctgggcactgtggctcacacctgtaatcccagaactttgggaggctgaggtgggtggatcacctgaggtcaggagttcaagaccagcctggccaccaggcaaaaaccttgtctctactaaaaatacaaaaattgggccaggtgtggtggctcacgcctgtattcccagtactttgggagcccgaggcaggcagatcacaaggtcaggagttcgagaccatcctggttagtatggtgaaacctggtctctattaaaaatacaacaattagccgggcatggtggcatgcacttataatcccaggtactccggaggctatggcaggaaaattgctggaagctgggatgcagaggttgcagtgagccaagatcaggccgctgcacctcagcctgggcaacaagagcaaaactccgtctaagaaaataatatatctctctctatatatatttatatctatctatatctatatatttatatctatctatatctatatttatatctatctatatctatatttatatctatatctatatatttatatatctatatctatatatgtttatatacgtatatctatatatttatatgtatctatagctgtatatttatatatctatatctatatatgcatatatctatatctatatatttatatatctatatctatgtatatttatatatatatctatatatatttatatatctatatctatatatttatacatctatatctatatatatttatatatctatatctatatatatttatatatatctacatatatctatctatatctatatctatatatatctacctatcaagtaccatgctcactacttgcctgatgaaataatgtgtacaccaaaccccagtgacatgcaatttacccatttcacaaacctgcacatggacccttgatcctaaaatagaaattggaagaaaacagcacaaataaaataagattcagaaattgagtatataaaacaacaacgattttaaaaacagctttcttgcttttctaaaatatggatgttaatagatgatctggatcttcagccctcatcttggaccatgaagaatggaaaacgaatgtcaggggtgatggagcagagacatccctaaaggcttcctgaagctgccatgctggcccaggtatgcctaactccccagtttttatgtgaaaaaaaaataatttacgtgttttaagtcagtatgaatagatctcaattattaatagctgaataaaggaaaatgagctgttgaatatgaaaaaaaaaagcgatattttgaaaaatttgctccagttacaatttaccaataacaattacagctctttgccaggtgtggtggctccctcctgtaatttcaacactttgggaaaccgaagcgggcagatcacctgaggtcaggagtttgagaccaacctggccaacatggcaaaacaccgtctctactgaaaacacaaaaattagtcaggtgtgatggtgcatgcccgtaatctcagctacttgggaggcagaggcaggagcatagcttgaacctgaaaggtggagattgcaatgagccgagatcatgccactgcactccagcctgggtgacagagtgggactccatctcaaaacagaaacaaacaaacaagaaaaactgttacagctctctagtgttcccagagaaatgaaggagtttggaacaggcttttctcatctatgatttctgaagaaagaaagaggctcacatggagagagcagaaaatgctgagtcttatatacgaagaacagacagtgaagtcagtgtgtctttctgggttctgcgcttccttaagatgatcctctgctaaaaagcaaactttttgtgaatcttcaaattcctgagcaaaactattctttaatatttaatcaggaaatgtgattatataaaaagctggaggccaggcacggtggttcacacttgtaatcctagcactttgggaggccgaggcagacgaatcacctgaggtcaggagttcgagaacagcctgaccaacatggagaaaccccgtctctactaaaaacacaaacaattagctgagcatggtggtggatgcctgtaatcccagttacttgggaggctgaggcaggagacttgcttgaacccaggaggcggatgcagtgagcggagatcacgccattgcattccagcctcggcaacaagagcgaaactccatctcaacaaaaaacaaaaacaaacacaaacaaaaaaagcttgagtagaatatgtgaaaggttacagtgcaaataaataactttgaatttaaatattgatataaacataaacatataaacataaatggggcaaatatgtgcaatttacagagatgtatctcaaagagttattctcacacagaaaaacaccaactttatatacttgagagataaattctacttattaaatagttgataaactgatgctatctagactgttcgagagttttaatgtagtcaatcttcccgctaatgtgtaagtgttcataagagggatatgagaactttgcttaagagttctcatatatgagacacatatagaatattacagacatatagaacatataagtataatgtaaaaattttaaatattagtagccattgtgtcagcgtactaaaacatataattatattatgatccagtgtactttatgccagaaatggaagtgagatttaccatttggaaatccactaacaaattagtcaaataattgaaaccaatagaatgtcatgtttcatgttcatagatataaataaagacattaccagaattctacagaaaagtttatatatatttatatatatacttaagatatatatatatatatattttttttttttttttgagatggagtctcactctgttgcccaggctggagtgcagtggtgtgatcttggctcactgcaacctttgcctcccaggttcaagcaattattctgcctcagcctcctgtatagctgggactacagatgtgtgccaccacacccagctaatttttgtatttttagtagagacagggtttcaccatattggccaggtttgtctcgaactcctgacctggtgatctgcccacctcagcctcctaaagtgctgggattacaggcataagcaactgtgccaggcctagaaaatcatatttttaaaaaattagtaaggatttagcataaagtatttctgaaaaatatgaataacagatttgtacaagtaaaagtagtggcaatatatgtttgaaaaggatgattcaacagtattggatcaatgatcttttaatcagtttaaaaattgagtttgaatgcaacagagacatcatcttattgtgttctgaaaatagaaattttgctgcaaagaagaataaatgaataaagatattcataaaaagcataaaaaaaaagtgggctgggtgcagtggctcacacctgtaattccagcactttgagaggctgaggtgggtggatcaccaatggtctggagttggataccagctgaccaacatggtgaaatcccacctctactaaaaatacaaaacattagccgggtgtggtggtgcatgcctgtaatcccagctactttcgaggctgaggtaggagaattgcttgaacccgggaggtggagtttgcagtaagccgagatctcaccattgcactccagcctggccaaaaagagcaaaaagtgtgtctcaaaaaaaagtaaaaataaaaaagaaaagtgaagtgacatcttctatgatgtgttataaggaattgaaaagttaaataatgtagttttaatttatgaacagatttagagaccaatggaatataaaattcaaaaatagcatgaaatatatatgaaatgtagtgtataacagatgcagcagtagtgaaattgatgtgaggtcaatgtgtctccctggagactaaagcccacatatatgcagtgaggaccttgtctcccaatgttttatttttgcacatctgatgttttcacatgtgcagggaagaggtttaatatttgattgtctttggctatggtctgatggatcagtctctcctgactcaatacacactgtaacctgttctcagagttcacagtatgtctcttggtgaacgtaggtgttactactgtctgcaaaggttgaccatctacaacagacactcttgctctgtttgggaataggtacttattgtttcagtagttattttcagttggtaaattttctgggggactcccccatgcccttgtcccacatgaggtaattctcttaaagcagttcaggaagaacaactttgcgtagactctggaatgggctgcttcaaagtaggatactccacataacctatattctaatatgcaaccaacagaagacagtacacttttcctttttctttttttttaaaaaaaacttttggagaagataggcaaggcatggtgactcatgccaataatcccaggactttgggaggccatgacaagagtatcacttgaggccaggagtttgagattaggctgggcaacatagggagactttgtctctataaaaaaaaaaaaaaagaaattaatagggcatgttgacatgcaactatagtccctcctactcaggagtccaaggcaggaagatcacctgagttcttcctatgtaaatattaaaggtccagactgtgaacagatctgaagtgaggctacagtgagctataatcacaccactgcactccagcctgagtgacaaagatcttgtttataaaaaaaaaacttgaaacaaataaagattctttgttataacaaataaaactaatcttaagaggatgtgctataatgtatattaacagatgttttgtgcctatactgaaacttttgtttgtttgtttttaagacagaatctcactctgtcacctaggctggagtgcagtggtgtgatctcacctcactgcaacctctgcctcccaggttcagctgtaatcccagccactcaggaggctgaggcaggagaaataacatggtgaaagtaccaataaacatggtgaaataccacctctactaaaaatacaaaaattagcctggcatggtggcatatgcctgaagtcccagcttcttgggaggctgaggcagagggatcacttgaacccgggaggtgtaggttgcagtgatccaagattgcattactgaactccagcctgggggatggagtgaggctcttgtccttaaaaaaaaaaaaaaaatactttaatgaaagaaatcagaaggagcaaaaagtagaaagatacaccatgatcatgatgcaaatactccatattgttaagatgtcagttcctcctagcttgatctgtgatgcactacagccttaaacaaaattccatgaacttcttttggggctactgaaaaactgattctgaggtttatatatagaggcaaaaacctacatgtagaggcaaaagacctagaatagccaacacaatattgtaggagaataataaaattggatgattgagacactactcagcttcaagattaaatataaagctacagtaatcaagacagtgtgatattggtaaaagaatagacaaatcagttgatggaacgaatgcagagcccagaggtaagcccatattaatatactgaatgaatctttgacaaaagactaaaggcaatacaatgcagccaagagaatcctttcaacaaatgatgctaaaacaactggacatccacatacaaaagcatgaatcacaaacattacatcctcacaaaaactgacacaaatggaacacagacgtaaatttaaaatgcaaaactataaaattcctagaatgtaattaggagaaaatctagatgaccctggatttagcaattataatttagataaaataccaccagttcattttctgaaagtaaaatatcgatgtcaaatttaccaaaattaagcatttttgctctgtgaaagacactgtatagagaatgaaaagaaagacacagtatggaagaaaatatttgcaaaagatatatctgataaggattgttatccaaaatatagaaataattttcaaacaacaataaaacaaacgacctgactaaaaaatcaaaataaagagtgagccgaagacctcaatcaacaccacacctgagggcagcaggaatgaaataaccacaggtaaaccactgcttgctagtgttgcccacctttctttcagagaacagacagtgaacaaaggatgatggggccacagaagaagtaaactctatgtcttcagatctgttcacagtctggacctttaatatttacataggaagaaaataaaggcaaacttattttgctatttggccttgaccttaaaggccaggctgtggttatctgttttctcctgtggtgtgggaaactgagtgaatataagcaccaatcacatgcgtacatgtccacatgtccacatgtatttctgcatttattttatttatttatttatttatttatttatttatttatttacttacttactttttgagacggagttttgctcttgttggtcaggctggagtgcaatggcatgatctcagctcacagcaacctccgcctcccgggatcaagagattctcctaccttagcctcctgaggagtagctgggattacagatatgtgaaaccaggcccggataattttttgtatttttagtagagataaggtttctccatgttggtcaggctggtctcaaactccggatctcaggtgatccaccccaccttggcctcccaaagtgctgggattacaggcaggagcgaccacactcagcaatacttctgcatttctcaacattatcttacaagacatctaactttaaatagggaaaaatatcagtacttttacggtgctcagcgttagaaggtaactggtaatcaacctgtcattaaatcttggcattctatctgcactgggtgcatgtatcagttagctatgcagcataacaaaccatccaaaactgattagctcataattgaactgctcagccatttacgctggactcagtggggccattcttctgttctcagctgagctccttcagacatgtgtcacgagctgctcattgactaggaaggcagctgtgcttctaggggtgagcttctgcttctggggctgtcaacaggggcaccttgcttctcctccccatggtatcttatcctccagctggctaatataagcttgtttcatgaagatggcagcattctgaaagaaaaacggaagcagccccagcatggtggctcacacctgtaatcccagaactttagtaggccaaggcagatggatcaccttaggtcaggaatttgagaccagcctggccaacatggtgaaactctgtctctactaaaaatacaaaaattagctgggtgtggtgacacatgcctgtagtctcagctactcgggaggctgagtcaggagaattgcttgaacctgggagatggaggttgcagtgagccaagatcacgccactacactccagccttggtgacagagaaagactccttctcaaaaaaagagaaaaaagagagagagaaaagaaaagaaaaacagaagtagtcaaaacggtttgaatcttggccccaaactaacacattgtcatgttcccaggtttctactgccctgagcaagtaagaactgccagagcaagcgttaggaaaatagattctggatcttgatgggaatggctgtaaaagcacctgacaatggacgtgaatacaggagggatgaaaaattgctaccatatttgcagtcagtatccttctgctgttgtttgtttgtttgttttgagagggagtcttgctgtgttgccaggctggagtgcagtggggctattttggctcactgcaacctctgcctcccaggttcaagctattcttgtgcctcagcttcttgagtagctgggattacaggcccacaccaccacacccagcgaatttttgtattattagtagagatggggtttcaccatgttggccagggtggtctctatctcctgagctcgtgatccacccgcctcagcttcccaaagttctggggttacaggcgtgagccactgcacccagcccattctgctttttctgcatgtgtggcccacagaactcttccacatcaagaaattttccaaacacccacagctactaaatggctgggctgggactcaggatcaactctgtctgactccaaagcctatgtacctccatggatcacagtattcaagtagctgtcctagactcttaaaatcctggagagtgacacttcaaaaatagaaaccagattgcttttagatttgtgcccacatagtactgtttattgttgggaataatctcaagaaattactgaagcacatggtggctcacatctgtaatcctaacactttgcgaggctgagatgggagaatcactgaagctcaggagttcaagtgcagcctgggcaacatagtaaaatcctgtctcaatataaaacaaatttaaaaagttaaccaggcatgatgatgctcgggtgtctagggtaggaggattgtttaagcctggaaggtggaggttgcattgagccatgattgattacaccactgcactccagcctgggtgacagagtgagactctgtctcaagcaaaacaaaacaaaaacaaaaaaggaattgcaaaagcattttgaaagaacatagaataacttggaaaaaatagctgacatagctgatattgaataacttggaaaacataacttattttagataatcaaagcccaacaacacatcacttatttttttatcatacaaaacatttgaaaacttttaaaagaaaaaaacttcagagaaattaagtttaacatagtttaattgagcaaagaataatttggaaattaagcagcctgtggtcccaaatagcctcagagagactccagcacagccacatggaaaaaaagatttatgtacagaagaagcaaagtgacattcagaaaatagaagtgaggtacagaaacagccggatttattacagcttgggatttgccttatttgaatatggtttgaccagttgatgttcttttattagcaaaaaggtagtggttggtacaagaataagttacaatctatttacatattcagctatgttttagtttactatgtacagaaaatcctattaaccaaaattaaacaaaaggggtcagctttaggctttaattaatttaacaatatctcccttttggttatctcctcattttcaagaaataaaccaaaactttagacattgatattactttgtcaccattacaaatgtacttatttagtctcaaattctgctataaaatagcagaactgtgggttttgtaaagtgaaaacaagtacttcaggttattactttttaaaaggattacagtagggaagacctccttgtttgaaatctgctgtttaccaaagaaaaacaagacctggccagttttagcatctacctagttctttaaattttcagtttgactatgtcacatttagcatgaatgactccattttggtttggtttggtctgtttgggcctagtgaacaagctcagtccagaatgatggcctccaataattttgtttaaaaaatttcccccttttgattaagttttcacataggtcagagtgtgaccaaaactcagggtcttagtgtcactctcagtttccattatttttggtttccgttcttatcaggtcattcatgggttatggtgttctcatggtcaaatacattttctagttttcatcattccagttaaagagagaccacttgacattctagagatgactgcatgcaaagatttataacttttgagagaatagagtgcagtagggagactattattttgactatcaggaaaataatatcaagagttagaagtatgctttttttttttgagacgaagtctgtcttgtcaccgaggctggagtgcaatggcacaatcttggctcactgcaacctctgcctcctgggttcaggtgattctcctgcctcagccaccgaagtagctgggattataggcatgtgtcaccacacctggctaatttttgtatttttagtagagatgaggtttcaccatgttggccaggctggtctcaaatttctgacctcaagtgatccacctgcctcggcttcccaaagtgctggcattacaggtgtgagacaccatgccaggcctgaagtatgctttttaaccaaggaccccatgaaccaaccaatagatcaaataattagctagttaaatggtctactcatttcaaccagtctgttcattaatttcctacaactgaatctctgtaatactcgatgtatttctccatgtgcaactacaaatactagcaactgcacagatacttctctgtttatccagtaagtaaactagataaattcttttatttaacacaactttagtaaaaaaaaaaaaagtcttccaatgactttttataaaggtcaacacattttttccactctaagtgcatctatcatcagttgcaattacaaaagtaatctagtgaatttagttagctttgctcagtactattgtatccgtaatgccttatttaacagttttacaatttttctagtgaaataagtatctttgtaattggagaccttttcaaaaagctttcatgaagaaaaaaaagtcttagtatccttttagctaccgttataacatcaaccttcttgcatcagaaagcttttatactaccagaaaacatgcattaaaaatgacaattgccaggtgtgcaattttctgtccagtgctcacgtctgtaatcccagtactttgggaggctgaggcatgaggatcacctgagggcaggagttcgagaccagactgactaacatggtaaaaccaagtctctactaaaaacacaaaatttacctgggcatagtggcagccgactgtaatcctagctacatgggaggctgcagcaggagttgcttgaacctggaaggcagacgttgcagtgagccaagatcgcgccattgcactccagcctgggcaacaagagtgaaactcagtctcagaaaaaaaaaaaaaaaaagcacacctgtaatcccagtactttgggaggccgaggcagatggatcacaaggtcaggagttcgagaccagcctggccaatatggtgaaaccccgtctctactgaaaatacaaaaattagctgggcatgatggcacgtgctgtagtcccagctactcgggaggctgagttagaagaaacgcttgaacctgggaggccaaggttgcagtaagccgagatcttgccactgcactccagcctgggccacagagtgagactctgtctcaaaaaaaaaaaaaaaaaaagacaatttgtgtgtaaatgtttaaatgatggccctgaggtagcagaaacttacataaacttttaattatcttctgataattataagttcgacaaaaaaaaaatcagtcttaaactagtatagtaatttagaagtcactacacacacacacacacacatgcacatacacattcaatttatatttattatagattaatacagattacttatcttttctgtgatgagtagtgaaatgcagagtttttaataatggaaacttcaagaactcaggaataggaaccatatgcggtggcccacgcctgtaatcccagcactttgggagactgaagaaggtggatcatgaggtcaggagttcgagaccagcttggccaacatggtgaaacccatttctactaaaattacaaaaattagtctggcatggtcgtggccacctgtcatcccagctacttgggaggctgatgcaggggaatggcttgaacctgggaggtgaaggttggagtgagccgagatcatgccattgcactccagcctgggtgacaagagtgaaactccgtctcaaaaaaaaaaaaaaattactttaattaaaaaaaaaataactcaggaaatatcaagtggctgcctatattctccatgagtccacactgaacattaagtttatgtcttcttaaacactaggttactttccccaatttaggtgcacagcactgatacctgagaggttatcataggtcatttgacttggaccacagagttgatttaaaaagcatatctaaaacatttccgtactggctgatgtaactgaaaatgtggcagagtacttttgtaatagtcaattaatttttgtcttgtctgggctcgcaggtttttttgtttgtttgtgtttgtttttgttttttgttttgttttgttttgttttctttttgagatggagtttctgtcttgttgcctgggctggaaatgttgtgatctcggctcactgcaacctccacctcacgggttcaagcgagattgcgccactgcactccagcctgggtgacacagcaagactccatctcaaaaaataaaaacaaaaatttaaaaataaaagaaattaaaagctaattttcacaaaactttataaataaatccaacaaatatatcattttgaccactctagatttccatacatagtttataatctcttttaattactttttttgatagggagtttcactcttgttgcccaggctggagtgcaatggcgcaatctcggctcactgcaacctctgcctcccgggttcaagatattctcctgcctcagcctccggagtagctgggattacaggaatgtgccactatgtcccgctaattttgtatttttagtagagatgggttttctccatgttagtcaggctggtctcaaaatcccgacctcaggtgatccacccgcctcggcctcccaaaatgctgggattataggcgtgagccaccgcgcccggccttcttttaattactttttaaattttctctactttatttttttctacgttctttttattttctcaatttgagacaacctttaagtaatatcaaactagacaaaatatttttaactttcttcattgaaagcatatttttgcttttgcttgcacaatctctatgcaaaattgtttttcttagatccagtagttttaattatatatattaattacatgaactctttaaaacctaatttttagtgaaatctctagtaagtaatcttgaactgtttgatatcagtatttgtagacaaccattttatatttttaatagaagatgttttttcaaattctctgttaactagcagatctaaatatgtttagcttttctctatcatataaaaataagattcttgttgggggtagtggctgacgcttgtaatcccagcattttgaaaggccaagacacaaagactgcttaagcccaggaattggaggcaagcctgggcaacatggcaaaaccccatgtctacaaaaaatacaaaattagctcagcatcgttacctgcacctgtagtaccagctacccaggaggctgaggtaggagaattgcctgagcccaggagatcgagagtgcaatgagccgtgatgaagtcacttcactccatcctggatgacagagaccgttttttaaaaaattaaatgccaaagcatataaacttaatcttatgggacttcgggggtgggggtttgtttttattattctctcaacagctttgtggctacaggtggtgtctgactgcatgaaaaagttttttacgggtgattgcagagattttagggcacccatatcccaagcagtgtacacagtacccagtgtgtagtcttttttttaatttttgttttttgagacagagtctcgctctgtctcccaggctggagtgcagtgggcggtctcggctcactgcaagctccgcctcccgggttcacgccattctcctgcctcagcctcctgaatagctgggactacaggtgcccgccaccacgcctggctaatttttttttttttgtatttttagtagaggtggggtttcaccttgttagcaaggatggtctcgatctcctgacctcatgatctgcccgcctcggcctcccaaagtgctgggattacaggcgtgagccacagggcctggcaccaatgtgtagtcttttatcccttttccccgtaccgttgtttcccaagtctctagagtccattatataattttttttttttttttgagactcagttttgctcctgctgcctaggctggagtgcaatggtgcgatcttgcctcactgcaacctccacttcccgggttcaagcgattatcttgcctcagcctcccaagcagctgggattacaggcatgtgccaccatgcctggctaactttgtatttttagtagagacggggtttctccatgttggtcaggctagtcttgaactccccacctcggtgatccacatgcctcggcctcccaaagtggtgggattataggcgtgagccaccccaccccacccattatataattcttaagcctttacatcttcatagcttagcatacatcctcatagcaattttgcaatggcaaattctgctgctataaacatgcatgtgcaagtgtctttttcatacaatgacttatttttctctgtgtagatacccagtagggggattgctggatcaaatggaagttctatctttaattcatttagaaatctccagactgtttttgatagtagttgtactagtttatgttcccaccatcagtgtaaaagtgatcccgttgtactacatcaataccaacgtctgttattttttgattttttcattatggccgttcttgcaggagtaagatgataccacattgtggtttgtttttcagttctctgatcattagtgatgttgagtatttttttaaaacgttttttaaccatttgtatgtcttcttttgagaactgtttactcatgtgctaagcccacttctttataggatagtttgtttttttcttgctggtttgtttgagtttcttgtagaaactttgtcagtcctttgtcagatacatagtttgcgaatattttctcccactttgtgtgttgtttgtttactcttctgattattactatttttttctgagcagaagctttttagtttaattaagtcacatttattgatctttgtttttgttgcatttggttttggggttttcgtcatgaaatctctgcctaagcaaatgtctagaagagtttttgctatattatcttgtatagtttcaagttttccatttaagtctttgatccactttgggttgatttttgtataaagagagcaatgaagatccagttttattcttctagatgtggctcgctaattatctcagcagcatttgttgaatagggtgtcttttccctacttcatgtttttgtttagtttgtagcagatcagttggctgaaagtatttggctttatttctttattcactattctgttccattggtctatttgcctatttttataccagtaccatgctgctttggtaactatagtcttctagtatagtttgaaatcagataatgtgatgtctccagatttgttctttttgcttagtcttgttttggctatgcaggatcttttatttttctgtatgaattttaggattgttttttctaattctgtgaggaatgatggtggtattttgatgagaacggcataaatttgtagattgcttctggcactatgatcattttcacaatattgactctactcatccatgagcatgggatgtgtttccatttgtttgtatcatctttgatttctttcagcattgttttgtagtactccttgtagaggtctttcacctctttggttaagtatattcctaagtatattttttctgcagctggtataaagggtttgagttcttgacttgattctcagctcagtcacttggtgtatagcagtgatattgatttgtgtacattgattttgtatcctgaaactttactaaatttatttctcaaatctaggagctttttgaataagtctttagggtattctaggtatacagttatatcatcaacaagcagtgacagtttgacttcctctttaccaatttgtatgccctttattcctttttttgtttttttttttcgatggagtcttgctctgtcaccagtctggagtgcagtggctcaatctgggctcactgcaacctccaccttccgggttcaagcgattctcctgcctcagcctcccgagtagctaagactacaggcatgcaccaccatgcccagctgatttttgttttcagtagagacaaaatttcatcatgttggccaggatggtctcgatcttttgacctcaccatccacctgccttggcctcccaaagcactgggattactggcatgagccactgctcacttatactttgacttgctacatctttattctgtatgaatattaacagaattatagatagatctggatatagatatatgtaagtacataaacacacacatacaggattatattagtttgtatatgtaaatatttatgcatacaaaagatgttcatcaatagacatttctaattttccaccctaacctaaggacatagatgaagacttacttttcacctatatggctttataccatctcagactggaacacagccataaagtgttatatataaacatgaacaaacttcatgtttatgatcatggcctgtgaataaatattttggtagtgggatgtaaggctttatgtccagcttagcattttaggtccttacttttcttctcagagtatgcctgtattattcacatccattattttgagcctgccttgatgtctacacttttccagtttagctaatcagttgattatatttacctgagctgacctaattggatttttgcaatcacacaggctgagctaatttgcttatttaatttatctgggatgcaggggtagaaatgaagatgacctttgtcctaaatgggacatatgcaaaaataacctttacctatacatacatatgtgactcattctttgtgtacatgtttatctatcaacctatcttatatccatatttatatttacagaaaaaaaggcattgaagtaaacttggtaaaaggtaatttctattttctttacttccaggctacataaatccaatcagccgattagcacagtgaagatttataaaatccaagccaaaactttgccgcacttttttctttcataaatgtgaaaatgtccttcttacctggcccccaggtctttttatttctgaatctcaataaatcagcctagtgggcttctgttcaaccagttgaaaaagcaggaatgcctgacatcagtaagactatccttactcaggaagaagttttgaactggccaataaaagccaccattggcacttttgtgaatgttcactatgatctggttgaaatgcagcctgctaccatgtacaatcacatttactttcagtatgattgcctgtcttcgagaaagagtgctagactttcttcccattaccataaagacactacttcagtcacaaagacgaaaataccagttgtacttttacattacatactcataaaaataaactagatcacatgtcttaaagaaagccctgatgagaaaaaaaataaacattttacaatttagatgagaaccttaggactggggctggttgatctccggccatatgtccaacatgaagggatggattaaacttgacatggcagtgaatgacttccattggttagtgcatgttcattttccaaaagtgagcaataaagaccaatgcttccttcgtatatgttaaatgcagcaggatgtatgtcagtgcatacctctatagtgtacccttgtagatctagtttacagggcaaatatatttatacatgtatagaagttacttttcttggggggagggggatggagtctcgctctgttgcccacactggagtgcagtggtgcaatctcagttcaccacaacctctgcctcctgggttcaagcgattctcctgctgggactacagggatgcaccactatgcccagctaatttttgtatttttagtagagacggggtttcaccatattggtcaggctggtctcgaactcctgacctcgtgatccatccacctcagcctcccaaagtgctgggattacaggcatgagccactgcagctggccaggtaaacagatttttaaaacttacatacaggactatatgagtatgtctaggtaaatatttatgtatacaaaaaagttccccaatagaccatttttaatcacttggcatatacaaattatacagacatataattactttcaatctcttttgctcagtagcatttcagaatggagcatagccatacaatattgtttttataaacatgaacaaaacccttcaccttcagtagcacaggcctcagaaataagctgacagcaaagccatgttattcatgctgttcaggttggcacttcagggccctgcatttcttctcaatgtatgtatgtgcccttcacacccactagtttgggcctgctttgataaacctatagtcactatttagataattgtttgattggatctacctaggctaagaaaattggctgattggaatcaccttgcgctaatctaattggctaattagattcatctttactgataaaattggctaactggtatcacttgggctcatttaactggtgaattggaatcaccttgggctaatctaattagctaattggattcacctttactgatataattgactaattggtatcacttgggctcatttaattggctgattggaatcacctgggctgagctaactggcctactagaatcacatgggctgagttcattgactgcgtcttgaggagaatgagtaaggtaatgacctcttacatacttttcttttggggctttttttcaagacatactcacaaatagacattaattagacttatgtatataagccttagtttttatatgtgttttcctacatatatgtctcatatctgtttctaaatctacagaagaaagtttccggccaggcgcggtggctcacgcttgtaaccccagcactttggaaggccgaggtgggctgatgacccgaggtcaggggttccagaccagcgtggccaacgtcgtaataccccatctctactaaaagtacaaaaattagccgggcgtagtggcaggcgcctgtagtcccagctactcgggaggctgaggcaggagagtcgcttgaacttgggaggtggaggttgcaatgagccgagatcctcgtgccactgcactccagcctggcgacagggtgagactccgttttaaaaaataatcaaaaaaccaaaataacaatgcttactttatataagttaaatgccgatggatttaggtaatagtatacatccatttgggtagtattctaggtatatttcatagtgcagaaaattttatacatctatggaattatctttatatattaatattgatatcaataatgatcaacattttcaccttctacatcttcactttttatgaatatagatacaaagatggatacatctggacataggtagacagataaacatgcacgtacagaattatataagtacaattatgtaaatgtttatgaatatacaagatgttccacaaattatatttttaataccttagtatatactaagaatgcagatgtagacttactagtctactttatggcacagtaggaaccccaaatggaacatagccatatacaatgatgtttatagaaacataaacaatacttcactttcaaaggcaaggtctttgaaataagctgacaatacagcaatgtaatgctttatgaccagattagtatgtctgggcactgcttttcttctcagtgtagaaaagtgctttttacatccaccattctgacttaatgaatctacagtcactagattattggctgatttgatccacctgggcagaactaattgccttattggaatcaactaacatgagctaattggttaattagatacttctgaactgagctaattgactgattggaatcacaaggttcaactaactggctgattggattctctagaacctagctgatttcctgattaaaatcacatgagctgagctttctgtttagaatcgccgaggctgagttaattggcaaattagattcaccagggctgatctcattgactgattggaattgttaaggctgaactaattggctgtttgaaatcacctgggctgagctaatttactgattggaatcacctgggttgagtcgattggcaaaatgtaatcacctgggctgagcaaatttactgattggaattgcctaggctgagctaattgggtaaatggaatcacttgggctgagctatttggctaatggaatcacctgggctcagctaattggctatttgaaaacacctagcttgagctcattggcttattaaatttgcctgatgaaattgtattcatctatcttgaggagcatgagtagggacataacctctgatttacttttcatttgtgagtttttttgttttgttttgcttttttgacggagtctcactctgtcgcccaggttggagtgcaatggctccatccctgctcaccgcaacctccgcctcccagggtcaagtgattctcctgcctcagcctccccagtatctgggattacaggcacccaccaccacacccagcttcatctgggaaaaaaaaaaaaagattctatttctatgtcatgtatttgaaaacaaaagccctaaatttgagggaagctttaaaaagaattatttctcatttgcaaatttgtgttaaggccttcaagctgaggctagtttatccatgttttcacgttcaccagaattaaaaaggccatttttgacttggcaataaatgactctcatggccttagtacatttttgctaacagatgtgagcaacaaaaaccaattctttctttgaaagcattaaatgcagcaagatgcaggtcagagcatacctccacttgtgtgctcttacggataaaattcaaagggcaaataagattttgcatttattgaagtttttctttacattgctataagtacaaacacccatttatcctttgacctcttatacctttattctgtatgcatatggaaaaagtgatagttagatctgtatgtagatatacatgggtagacagataaacacacacatatagaattatatgagtttgcctatgtagatatttacgtatacaaaacatattaatcaatgaacattttaaattccccagcctacactgaggaggcagatataaacttactctcaactatatggatccatagcgtctcagactggaacacagccatacaatgttatgtttaaacatcaataaagcttcacgtttaggtgcatggcctgggaagtaagtttttggtaaagccatttaagactttagttccagcttagcattttcagggccctgcttcctttctcactgtatgctcatgtgatacatttgccatttgggtcctgcctggatgtcttcactttcccaagttagttaattgacttatattcatctaagcggctcattaaactcatctgggctgcagaagttgggaagaaaaacgacctctgacctacttattctgtggcttctctacaggacataagcaataatagaaattacattggtatacctatgttacccattttccatgtatatgtttatctagctgcctatcttatatatatatctatatgtataaaaaagactgccaaagaagagtaggttagaggtgatttttactttattgtccattcaggccgggtaaatccaatcagccattagctcagtgaagttttatcaaatccaatccaccaccaaatcacgttgtgctaaatgtgaaaatgtcctcattactgggcaccaaagtgttttaaattcagagtctaatcaaaatagcccatgtggttctgtccatccagctaggaatcttcagacatgccagtaggcctaattttttttcacaagctctggcctgaccaataagaacaacctttggtgcttcagtgcagtgtcattatcaaatgcagccaggtaacatgtaccattatatttgctttcagtatcataatcttctaataagaaacctaggctttccattatgataaagaccctactttagccataaagacaaaagggcaagagtgtactttcacattgcacactcgtggaaataaatgagaacccctgtcttgatgaaagtcttaatgagaagaaataaacattctcaaattttggtgagaaactttggactgagtctagttcaactttggccccatgtgtaacagaaacagaaggatcaacattgacatggcaatgaacgacttccattgccttagtgcaattttttttttttttttgagatggagtttccctcgtttggcccaggctggagtgtaatcgcatgatcttggctcaccacaacctccgcctcccgggttcaagcgattctcctgtctcagcctcctgagtagctgggattacaggcatgcaccaccatgcctggctaattttctatttttaacagagatggggtttcgccatggtgatcaggctggtctctaactcttgatttcaggtgatccacccgccttagcttcccaaagtgctgggattacagacgcaagccatcgcacctggccccttagtgcattatctcccagaagcaagaaacaacaaaaaatgcttttttcatatatgttaaatgtggcaggatgtatgttagaacatatttttatttgtgtaatatttgtgatattgtttatagggcagataaacttatacatgtatggaagttactttttttcgttttgtttttgtttttgtttcttgagatggagttgcactgtgtcacccaggctggagtgcagtggcgcaatctcagctcactgcaacctctgcctcccgggtacaagcgattctctcacctcagccctccaagtaactggggttccttcacccaccaccctgcctggctaatttttgtatttttagtagagacgaggtttcaccatgttggccaggctggtctcgaactcctgaccgcaggtgatctgccctcctccacctcccaaaatgctgggattataggcgtgaaccaccgcgcctggggggaagttactttttatcttactatattcatagtaatgcatatcaatacaaagattgatacatctagatataaatatacataagaagacaaacacatagagaattctataaatatttctatctaaatatttatgtatacaaaacacgttccccaaaagacatttttaatcttctaacatgcactaaagatgctgatgtagaatcattttttttctcttgctaaataatgtaaataacatgctaaatagaacataaccatacaatgttgtttatgtaaatatcaacaaagctttatcttcaagggcaaagccgcagaaataaactgagaataaagccatgtaactcatctgtccaggttagtattccagcaccctgcatgtctcctcagagtgtgtgtgttctgttcacatccaccatttggggcctgccttaataaagccacaatcactattcaaatatttgtatgattggtttgccctgggctgagctacttggctggttggaatcacctgggctatgcaaattggctgattggaatcacccaggctctgctaatttgcttatttaagttacctcagcttcaggggtagaatgtggagatgtcatctgacctactttatttctgaggcttttttttgagggacctatgcacaaattaacattacgtagacatacccatgtgactcaatttgtgtgtatatgtttatctagccacgtattttatatctctatgtacagaaagaagcctataaaataaacttgttcagaggtgatttccattttcttttcctacaggttaggtaaatccaatcagctacttagctcagtgaagatttattcaaaccaagccacatgccacatcacatttttttccataagggtaaaaatgtttttaataacctggcacctgggtgtttttaattctggtctcattaaacaagcgcagtgagttttttccatgtatctaggaactgccagaaatgcttgacacaagtgggctgagccttcctcacaaagatttgatctggaatataagagccacctgtgacacttcagtgaatgttcactatcacccatttgaaatgtagccaagtaccatgtaccattatatttgcttccatcatcaccatctgtctactaaaaagatctagacttcttttttattaccataaatacctgactcctgccacaaagacaaaaagataagactgtgattttacatcacacactcttggaaaaaaatagagttcttgtcttgatagaagttctaaagagcgggtgagagattaaatgactaccaggagctagataattgctgttttactaacaaatgttcattttcatttctatattatctcattatgttaataatgaagtaataacgtttatccagggaatttcaaaaaaacttattttttcatcagccataatagtaatcaaagacagagaaatggaggtgtttaactttcataatttatattttaaaattaaaatgcttctagaaataaaaaaggaaaggaagaaagaaatatacaaacaaatgaaagacagcctggtcaacatggtgaaagcctgcctctactaaaaatacaaaaattagtcaagtgtggtggtgcacacctgtaatctcagctacttgggaggctgaggcactagaatcacttgaacccaggaggtggatgttgcagtgcgccaagattgctgcactgcactccagcttgagtgacagaatgagactccttctcaaacaaaacaaaaaaataaacaaaagggaaggaagtggattactcacaatagctaaggtatggaatcaacctaaatgtgcatcagcaggtaaatggagaaagaaagtgtggtatatgtacacaatgcaattttattcagcccttaaaaataaggaagtcttgttatttgcaacaacattcatgaacctgaatgatatgctaagtaaaataagccagcacagaaaagagatggagtttccctcttgttgcccaggcaggcagtggtgcagaggcaccatcttggctcactgcaacctccgtctcctgggttcaagcgattttcctgcctcagcctccccagtacctgcgattacaggtgcccaccaccatgtctggttaatttttatatttttagtagagacagggttttgccatattggccaggctggtctcaaactcctgacctcaagtggtccacccacctcggccccccaaagtggtgggattacaggcatgagccactgtgcccagcccacataatccaacatctatgtaaagtgtgaaaaaaatttaaactcgccaggcacagtggctcacgcatgtaatttcagcactttgggaggccaaagtgggcaaatcacaaggtcaggcatttgagaccagcctgaccaacatggtgaaaccctgtctctactaaaaatacaaaaattagccaggtgtggtggtatgcacctgtaatcccagctactcaggaggctgaggcaagagaattgcttgaatctgggaggtggaggtagcagtaagccgagatcaggccactgcactccagcctggtcaacagagtgagactccatctcaaaaaaaaaaaaaaaaaaaaaatttaactcatagaagcagagaatacaataatgagaaaaaaaaaaaatccccctactgggttttggtctggttaagagagcttcttcatgatctttcagggattatatatgctttcattttctgcatccctctgttctccagtcaaagggtgaaaaaagatacagagaagacaatttgctttttacccacttcatttccactcactattagtcaatgtgggtatagctgagaatagcagttttctggcaggacagccacttctaagcaataaacaacacactgaaaataaagtataaatctttcataaaaagctaatgaattttaagaaaaacaagcatatgcatcagtaattcttggggtaaaataaagattcattttgttaatttctattgagttcccaaaatatttgatcaaaagctagcaaatatacaagagaaatggaatattattctaaataagaatattgtgaatggttattttgtcaatacaagtaaaaatatgatctcgcactaacagtctcacttagagttgtacaacatcaaatgctgtttttcatttaaaattgtatttcatataggtattcaatttatatcaccctcctttgctatttcaatcccttctccactttatatcagtggaaaacaggccagcaggtcccaggaaagcacatgttgctattgctgctttaacaatgatcatgaagagcacttgtttgggtgcgactcacgtgtcaaacactgttatttggcttaaagtgaggcagaagtttaaaaataataggtactgcatttgttcaccccaagaaaagtaaaagctaaggcccacaatgtggtaaggcaagagttaaaaagaaaagaacaagtttgcctctgcctagcagctcacttcaaggacagttagaagataatactgtctgaatagccaaggccaaaggaatgggctccagacatccacctccctttcagagcaaggttgaaggaaaaaacaaagagaaagataggttcttttactattactcttttcccaggcttcttaagcatgattatgttttacaaatgtctgtatttagccagttcttgtttttcttctaatgcagctacaaggccaccggctaggtcacaagttatattacgctatagattacgtgacctgtcactgtatgattaactgctattcttttgcttctggaatgctgcttctaaaaaccccactctgtctttgttcaatgctcagcttttggatgtgaatcctctgagccggtgcataactaaaataaacaagcccttcggtactccgtattggtttcttcattcctcaatttaccacaacatttttggtgaccacgaagggaccagagagggcaggcttactgtctcctttgcctctggggactggagcgtgagcctcgggaaacctgtggccccaggtgccactgggagaacttcagcccggaggggagatcagctgtcttttcacccagtgccccctacccagcagtgcaatagaacctaaagaggagctacaggacaatttcagaaacagcgtgcttcaggaagcacggtaaggttttgggggcccaaggcaggacctgtcccttggacagaaggggagcctgatcacctcctggggtatgccaaataatcggacccagaggggctcagggcaatgggagtggctcatcgattcggatgaaactcacaacctgctgacacaggacatgaaagtggttcactaagttgcctaggaaactggaggtggtgacagaggctcaccaccccaactgggaactagagggggcaagagtggctcgccacaccaactgtgaaactagagggggcgggagtggctcaccaccccagttatgaacatgggaactgaaaatgtgtgaaagtatgtgaatggaggggactaattaggctcatcagctgggaagtggggagtcacagatctctcagcgtggactgtgtgctccaagaaagtgtggggtcgactaagactagtggcaatctacatacagctaatagaaactgccctacagctcagagttgtagcgggaataaggacttctccaaagccaagcagcatctgaaaactcctgtagtaagagacagtgtagtcggctaaaatgagaggaagagtgagtgtgcaagagtgaatgtgctgcgtcgtaaagggaggagtgcgaggaaagtcatcaaaacatcaaaacttggcgtgcatgttacagaaccttaagaaaggttttgcaggggttatagagttaagattaagattatagagttaagattatagattatagagttaagttaaccccctcagaggttgagaactttctgtgaattagaatggccctcttttggtgttggatggcggagcaaacgaactatagacggaaaaattggccatgtatttagggtggtgacagggggtggaggactgccagtgtacccagatgaaattcctttatattgactcgtggttaaatataatatagacaaaaccagcatagatccagccctgtttaatggcttattgcaaaaaaagccaaaagtgaaagtaagagcagcttcactggcagatacagagttaaacggggagtcccagagaaagcaagagaagccagttttgcaggagctgccagaggaaacagaagttcttcctccatatgtcccagcctacccccctttaccgaggccaacagcccccccaggaacaagattcaggagctaacacgccccaggtctttcctcgaaggggaggatcaggcccttgagaggctagggaaggaagtcaagacagtcaagtgggccatttcagatctggccatgctcaagctgtgcaaatgcctctcagggagaagataggacctatctattatgatgaccagggccacatccagaggggggcaatggacttatatctatcagcccttttcaattactgatctactaaactgaaaacaccatacactgtccaacatggagaagcctcaagttcttatagatctgatgcaattcctctttctgacacacaatacgacctggccagattgcaggcagcttttcctaatgttgtttaacattaaagagtgccagaggatgacacaggtggctctccgctggctagaagcccatgcaccaacagacatagtgaatgctcaggcatacgctcagggtcagttcccagaccaagaccccaactgggacccggaggatgcaactcagcttcagcgtttgcagaggcaccgagaggcacttctgcagggcctaagagctggtggaaggaaagcaattaatataaggaagatttcagaaatgcttcagggagctgacaagagcccaagttagttttataagagactctgtgaagtattctgcctttatacctcatttaacactgaggttgctgaaaatcagcctgtggtgaatacagcatttgtaagccaagcccagggtgacatcaaggggaagctgcaggcatgaataccacccagtctataaaagtggccaaggtgtatgttaactgtgaccagggaacaatatgcaaaagcaacaagtgtggcagctaggcattccaagggttaactccctctccccagcccggctctatttggaacgagacgagggtggagactggcactgggagaagagcgaaggagaaggtaaggagaaagagtgtgagaagggaaagaagaaagtaaaacggaaatcagaaagaaacaggagagacagacagcaagcgtgtcagtagggtccgtactcttgcccagacccaccgctggctgcagaagcaggagaactcaggaaggaaaaaggaaagtaaattgaaagtttaagaaaaaggccagtctgttggcaacagctcttatggaaagagagattagcaatgtgagaggacttggacgtggacgcagacatggaagaagtcaagttaggcagaaattcaagagccggacaaggctggaaagagattaatgtatgagaagcaaaaagaaaggaccctggaaagatgaatgttcagaaggcaatgacggaaatggctaaggcagcgagacaaagaggccatcggtcaagggctgccgcacctttgaggaaccaaatactgatctgattgggctgccaggagctgaaggatgtaaagactaagacagatcgggcaccttctcactaggcttccaggagcccatggtcacattagaagttaaaggcattatcctcaggtttggactgtctctaactttaaagtcagacaatggactggcatttctagctgaaatagtgcaagatttaacaagactgttaaaaataaaatggaagttacatacagcctattagctgcaaatttcaggaaaaggtggaatgcatgaaccagacactcaaatagctactgaagaaatattgccaggaaattcatttgagatagaatcaggtgtttgcatatgatcctcctccaagtcaggtgcacccccaccaaacaaattgggtatttgcccagtaagattttgttcagtcaggcacccccaaatcaaaagtcaaattaaaggtgccctccagtaagtaggggaattaaccttaagaaagagatgcaggctttaggaatagccatacaaagtgtttagaattaggtacatgaaaatgcctataagcctgacacccctttaaatctggtgactgtttaggttaaaaagtagaatctaatttctctaggactcaaataggatgagccctctactgtaatcttgtccactcccactgctgttaaagtttcaggtgctgtgtcttggatccaccacagtcggctaaaaccggcagctcaggacaagtgaaccagccagcaggacccagatcatccaacctggctgatcctgaggcgagaccaagctgctgctgaggacaacagccctgctctggtcactccagaggctgaccagtctatgcatggctgaagcttgaggaaacaacaagccctgctctagtcacacaccagaagctgactagtctatgcacggccaaagcttgaggactcatcaagcaagtaaatgcagttagaaatcttaggactagtagttttactgtatactaactgtttgactgttgttctgtccctgtgctcaacctttttcccaggtgaggacctcttttgcccttgctggatatgaatatgctgtacattgttttgttgttgttactcctcttaaccattctagaataaacacctatagaagggtgtctccactgtacacatactacttgattagggaacagtataactagaaccctattgtactatacttatgagtgtacagggactcgattaggaacttgtacttataatcagaccacctattcaatttgtgacccaagaaatggtcagccttatatatgctgtgaccctgagtctttacctgggactcggttggagattcatactgagtcaaaggaaagaagttttataggtcaaacccaagcctctcttcctggagctatatgcatatactttgatatttgtcagttaacatctatgaacccaaactatctcacaatctctggtcctacagagtactatacaaactgccagtacaaaattgtgtgtgcaccctctgtttgtccttccaaggccctagcaatagcttgctggaactgtacaatgcagttcactgactgatcatcaccgaggtcaaagccaatcttgctcatcaaagtaccagcaaaactggattgtaagacaagcacttgcaatcctgtaagtcttactatcttaaagccagatctacctatatggactacaggttactccattgcattacaaagctatggtcaaaaaactaaaataactttgtatattctaaagaggactcaaaccaagcagtcagcccagcagcaattctgagtctttaagtcattctttgagcatataaaccagaagttaccagagcctcctcctttaggcaaaaacctatttgctcagctggctgaaaacactgccagcagcctaggcgtttcctcatgttatgtttgtgaagggactaacatgggagaccaatggccttgggaagtaaaagagttaatgcctcaagataactttactctgactgactcttttcccaaacagatgcccacaggttcaagcgtctggctcttaaaaacttctattattgggagatactgtgttgcttgctggggaaaggattttacagacccagtagaagaacaaacctgcttaggacagcaatattataatgaaccattaaggaaaactttgtggtgggacagagatgactacaaagcacatcatccaaattcgttctcccatttctcttctctaaattacacttggtatcaacttgcagctccaaatacttggcaagcacccccggtctttactggatctgtgggcctcaagcatattgacagttgccagctaaatggacagggggctgtgtgcttggaacaattagaccatctttcttcctgctcccactgcaacaggggaaaactttagggtatcctgtctatgatgaagttagaagaagaaacaaaagagatgcagccataaaaaatatataaaaaataggagattgggaagacatagggaagtcccctgaaagaataattcaacactatgggccagctacctgggcacaagatgggtcacggggatactgcactcctatttacatgcttaaccacatcataaggttgcaggcagtacttgaaatcatcatgaatgaaagagcaaatgcattagatttactggcccagcaaaccacaaaaatgagaaatgctaactatcagaacagattagctttagattacctcctagcccaggaaggaggagtatgaggaaagttcaatctaactaattgttgcctggaaattgatgacaatggaaaagcaattatggaaataactgcaagaatgagaaaattagcccatattccagttcaaacttggaaagggtggtccccagattctctctttggaggctggttttcatttttcacagggttcaagattttaataagggtggttctggccatactaggaactgcctaatactcccttgtgtcttacatctgcttgttagaagcattcaatcaactatagaggaaatagtagctaggcaaactaccacacagctcatgactctgtgtaaatatcaagctttgtctaaagaagaaaacttgtctcttcaggcagaactaagtaatagtgatgacttctattaaacttctttcataaaaggcatcagaaaggggaaactgaggcaagcatttaaaaataataagtattacaattattcactccaagaaaagtaaaagctaaggcccagaatgtggcaagacaaggattaaaaagaaaagaacacgttttcctctgcctagcagctcacttcaagaacagttagaagataacgctgtctgtacagccaaggccaaaggaatggactccaggcacccccctcccttccagagcaaggttgaaggaaggaaaaaaaaaaaaagagaaagacaagttattttactgttactcttttcccaggcttcttaagcaggattatgttttacaaatgtctgtatttcgccagttcttgttttccttctaatgcagctacaaggccactggctaggtcacaagtaatgttatactatagattacatgacctgtcattgtatgattaactgcttttgttttgcttctgaaaggccgcttataaaaaccccactctgtgttcaatgctcagcttttggatgtgaatcctctgagccggtgcacaactaaaataaaaaatcctcctgtactccgtattggtctcttaattcctcagtttactgcaataaaagtactgtttttctacttttttctaaatttacctgtaatataaaattgttagccaagaagactttatcttattcaaatatgttttatgggatttcattaagtgtctgaattatctggagtacttacattttccattaagctaaattgagtactacagataatctttaactaaaagcttttctgaggcagaataagatttgtaacattttattatcatatgaaagaagtgtattaaccatgttttcagtaatcactctgaacacagcattctcagttcccagtatgcaccctgagtcactcaggggaaactggtttctctgtaaagaggcagaagaaaatgctgagtggaggcaccacactgcacagcaatgctttccacatgcacctattagggtcttcatttaattgggctgatatttgcatagctacttactgaatttagtcatactatttttgagcagctaatggtgtctgttacctattaattttatacatttgctttttttgaaaaacaaatcttttgttaatttactctaagttgagactacatttaaaatgttcaatttttcagcgttaaagcaaatcagagaagagcaatgtgtatatagtgtgcattttcctatcaaaattctttattgcattggaaaccccaggaagccaactataaaatactccctttgaatactttagccaggattttagacttcaaaaggtcaaaaacaatgagcaaagtcaaaatcttgtttttatttcttgttagtcatctggccatttccaaaagcatgataattaagccaagtcattgaaaatatgcagttttgattaattttatcccatttggaatgttttctttaattgttttatcatgttaatctaaaagaaactgtctacataattatgctttcaagaattattcatattgtttacagtttaatcatttactacagtatagtaaaatcatttacaatagaattatgaattcattgtttttaaggtttttcaaatatgaaaacagttaggtatgatttgatgtaagttcaactctaggacattacccactggtcttcatggtatttctgtaatgaatagtataaaactaggtcgccagaatggtgcagacatgctgattgaattagaatgagttcagccttgttggtagactattggtatcccagaggctgatcattcactacagcttactaaatgtagttccataatgccagtgagcacttttacccaggttacctttttcctttcattaatgtggacctgttgtggtctcctgtttttcttaagctatcccaggtgagaggtgattatttcttgcatgaatgagattccctttttttcccctctgccataggatcctcttattctccctactggaagcaacatgcagaaggcaggaatgatgacaataaacaaatacgtttcctgccatgtggccaccataagcagcttacaacatggctcacctagaagtcacttactttcaggccagcaggggtgttttctatgatgtgtctctttctcttaaaagcacttctgattaagtttagcacaatcaggataatctccattttggtaaacacgaagtcaacagatgagtaacgtaatttcatgagtgatgtcccaccacagtcacacacttttttacactcgagagtattacacagcaggtgcgcaacagactgggaatccagggtattatcttaaaatgttgcctacccacctgaataaacttttaaaatagtctttctactgcttttgttatctacataaacaaaaatgtcatctgcaaataataactactttccagttttattcattacaaatattaactaacatctttttttctggcttaaattattattcctttatgtgtcattttatacattcacacacacatagaacaataaaaatgtatccaattattcaattttggttaaatttttattaaaataagcgttaaaaataattttttgagtgtgtttgaagagggcttttattgttgtactcaagagtgttatttctggagacaaagttgcctgtgctttaatacacggattctggggagaatccgagccataagccataaaattttatattaataaattccatacaaagcagaaagtatacatttgctttcagcatattcaaggtgtttagttttccattaatcacctaaaaacttattttgttccaataattgcgttttcttctgaaaatatgtacaaatgcatatttaccaaacactcatttcataattttcttacacctaaggtttatcttcagaggaatatgtgtatatttcactctatgaaaattaaaagtctttacgtttgcaggcagagtgaccacatgttcaaagaaactatataacaaatatttattaataatttttcaggactcagaaatgtaattttttttcctttgaggagtctcatcactctgtcacccaggctggagtgcagcagcacaatcttggctcactgcaatctccacctcccaagttcaagtgattctcctacctcagcctccaggtgtgcgccaccatgactggctaatttttctatttttagtagagacagggtttcaccacattggcgaggctggtcttgaactcctgagctcaagcaacacacctgcctcagcctccgaaattgctgggataataggcatgaggcactgcacatggccgtattttttctttttttttttgtgacggagtcttgctctgttgcccaggctggagtgcagtggcacgatctcggctcactgcaacctctgcctcctgggttacaccattctcccgcctcagcctctggagtagctgggactacaggcgcccaccaccacgcccagctaatttatttttagtagagacagggtttcaacgtgttagccaggatggtcttgatctcctgacctcatgatccacctgcctgggcctcccaaagtgctgggattacaggtgtaagccactgtcctggcttttttctttctttttgagatggagtgtccgtctgtcacccaggctggagtgcagtggtgctatctcagctcactgaaacctccacctcccaggttcaagccattctcctgcctcagcttcccgagtagctaggaatacgggtgcaccaccatgcccaactaatttttgttgttttagtagagagtttcacaatgttggtcaggctggtcttgaactcctgacctcatgatctgcccgacgtcgcctaccaaagtgctgggattacaggcatgagccactgcgtccagcccatattctatttatatttctgtataatttttattatgaccataaaaatcaccctgtagtcaattacaatttaattggacatttaaaagtaactaaaagtgtataattacactgtttggattagaaaggataaatgctagaggtgacagataccttatttaccctaatgtaattactacatattgtatgcctgaatcaaaatattctctataagacatatatacacatactatatactcacagatagtaataataaattaagaaaaaagattaaaaatttaactaacgggaacaatattcttcatttgcagtttactggcaaagtgattactagtgatgacattccactacataccaaatagtatacttcttccatcttttgcttacaccatttgagtaaggccggataggttaaagttagtggcataataatgcttcattaaatgcacaatagttttaagatggtaaaaaataaaataaaattaggctggacatattggctcacacctataatcccaacactttgagagcctgaggtgggtggatcgcttgagctcaggagtttgagactagcctgaccaatatggggaaaccccatgtctattaaaaatataaaaattagccaggcgtggtgtcacgcacctgtagtccccactactcgggaggctgaggcaggagaatttcttgaacttgggaggtggaggttgcagtcattgtgctgagactgcactgctgccctccagcctgggtgacagagcaagactccatctcaaaagaaaagttaagtaagtaaataaaatataagttaagttcacacatcatctaacaatttttaaatatattgcattttattacgtaacagtaaaattagtaaaataattgatatactttaatttataatttctttctctcagtataatgtagaaaagtattactctgaacacctaccttaaacattacttaatataggttaactacaatgagcctctccacttatattttcgtcatgcatcttacattttaatgtccttactgttttatagaaaaggtcataaagaatgcccaactcataaagaatctctaatatctctgatgcagcaacaattgatcacatactttcacgtgaatataataaagtaacagcataatttgaaagctgtattacatcattcacttttcaaaaaaattgttttcaaggaaacaaatatactttcaatgtaaatacaaagcttcaaaaaatctccttttaaagttatatactaatttatacaaacttatatacaaatttaacaactttagttgtgaattcatttatatactcaacactcttatttaatgtaatgtctgaagtgtcagtgccttagttattctgtaaattctgatatttacatacaattaattttgaattaaatattttttcatgtttactgcatctgcaaaaatatattttagtataaactctgctgttttctaagctgtagttttttttttttaaagtgtttccaaattcattacatttgcaggacccttctccaatataagttctctgatgttgagcaaagcttgagcaactgcttcaggattttcctctagtacaaaatgtgtgtaataaacctcctgtatatttgtaatggttgtcttcagaataaatactcttcttcactttaaaggcttatattttctgaaagattttttgacagtaattgcacttttaatgctttcattaactatgaaccttcttatgttgagtaagatgtgagtaggcattaatgggttttccatattctttatatttgtacaatttttctcaaggataatagctttcctgcaaaataagatgtacacattgattaaaggttttgccacattcttcatgcttgtaggaattttgccagtatgaattatcttactatcaaatgtggcaaccatataaaggctgtttcacattttatatatttctagggtttcacactagtataaattttttatgtatagaaaggatggaagtgttgaaaaaagcactgtcacatctttcaggtttgtagagttcctcttcagaatgaattatcaccatgtctcttaatagtaagaacttgtggccaggcatggtggctcatgcctgtaattgcaacactttaggaggctgaggtgggtggatcatgtgaggtcaggggttggataccagcctgacaaacatggtgtaaccttgtctctactaaaaatacaaaagttagctgggcatgggggtgggcacctgtaatcccccttacttgggaggttgaggcaggagaatggattgaacccagaaggcggaggttgcagtgagccgagactgtgctattgcacaccagactgggtgacaagagttgaaactccatctcaaaaaaaaaaaaaaaaagacagaacttgttatatgctttgccacattcttcacacttgtagggtttctttccagtatgaattatgtgtaataaaggttgagaagttccttaaaaaatctgtcacattctttatatttgtagagtttatatttcatatcaattcttagttagaaattgagggctggttaaaagattttccccattcatcacattcacatggtttctctccagtatgaattatcttatgtgcagtaaggtgtgaggataggtgaaaagctttaccacattattcacatctgtagggtttctctccagtatgaaatctcttatgtgtagtaagtttagaggagtgcttaaaggctttgccacattcttcacatctgtagggtttttttccagtatgaattttcttatgtgtagtaaggttagagaaatgcttaaaagctttgtcacattcttcacatttgtagaatttctctccagtatgaattatcttatgtgtagtaaggtgtgaggaccgcttgaaggctttgccacattcttcacatttgtagaatttctctccagtatgattctctcatgtgtagtaaggattgaggactggttgaaggctttgccacattcttcacatttgtagggtctctctccagtatgaattttcttatgtgtagtaaggttagaggagcacttaaaagctttgccacattcttcacatttgtagaatttctctccagtatgaattctcctatgtgtagtaaggattgaggactggttgaaggctttgccacattcttcacatttgtagggtctctctccagtatgaattttcttatgtgtagtaaggttagaggagtacttaaaagctttgccacattcttcacatttgtagggtttctctccagtatgaattatcttatgcgtagtaaggtctgaagaccgcttgaaggctttgccacattcttcacatttgtagggtttctctccagtatgaattctcttatgtgtagtaagggtagaggagtacttaaaggctttgccacattcttcacatttgtagggtttgtcttcagtatgaattcttttatgtgtagtaagggtataggagtacttaaaggctttgtcacattcttcacatttgtagggtttttctccagtatgaattatcttatgtgtagtaagggttgaggaccggttgaaggctttgccacattcttcacatttgtagggtttcttttccgtatgaattatctcatgtttactaagggttgaggatgacataaaggctttgccacatttatcacacttgtagggtttctctccagtatgatttctcttatgtgtagtaagagtggaggagtgcttaaaggctttgccacattcttcacatttgtagggtttctctccagtatgaattttcttatgtctagtaaggctacaagagtggttaaaggctttgccacattcttcacatttgtagggtttccctccagtatgaattttcttatgtgtagtaagagttgagaactgcttaaaagctttgccacattctatatatttgaaaggttttttcccagtatgtcctctcttttgtccgtttgaatttggaaattgatgaaggactttcacatatttatcacattgacatatttttcttggggtagttgtcaaacattggttaagttcattataaccttctttgtgcaccttacactcatccacacttatacatcctttttttaactgtaaattgtcatgttcacatttttcatatcttctcagtaccactttttggaaagaatctttcatgctctgctctggccaaaggtcttgggcaaaatgagaacacattactgaaagaaacaataaaaacacattacttcaattggtagactcagataaatataaatatatatatgcagtttgtatagttttatacaaactacataagcaagatgacacaggaaaataccacaagctgtaatttcttcctggacatatgaatttaacaaaaacatactgatcaaaatacatttgtaaaaaacttataataagttgtgaagggccccaggtgagcacaatgcaaacggccaaatagaagaaatagaaaagtctgttacttatacacaacacagctggttttgctctccagtataacattgtgcctttaaaagtaaattgttgactggctggggtgacacacgcctgtagtcccagcatgttgggaggctgacgtgggtggatcagaaggtcaggagttcaagaccatcttggcaaagatgatgaaattcaatctgtactaaaattacaaaaaattagctgggtgtggcgatggggcacctgtaatcccagctactcagaaggctgaggcagagaactgcttgaacctgggaggtggaggttacagtgagctgagattcccagaatctctagttaagacaattgatttcagactatgccaggacacagctacattataaagattgtaacaggtagcattttgttaatgtaaaaatctcaaagattacaataaatacaaaatagtagagcaacgtgatcccatcaaaaagttataaaatttttaaagcaaccataaaatgtatatgaggtaatttaaaaaattcccaataagttgtacaggtcaagcttagtggctcattcctggaatcccaacacactagggggccaaggtgggaaaaccacattaggtgagaatttgagaccagcctggccaacatggtgaaaccctgtatctactaaaaatacaaaaactagctgggcatggtggcatgtgcctgtaatcccagctacttgggaggctgacacacaacacaagaattgcttgaacctgggaggggacagttgcagtgagtgaatattgtaccactgcacttcagactggatgacagagcaagactgtctcaaaaataaaataggctgggcgcaatggctcatgcctgtaatcgcagcaacttaggaggccaccttggcctcctaatttgaggtcaggagtccaaaattagcctggccaacatggtaaaaacccatctctgctaaaaatacaaaaaattagctggaatgctggcagccacctgtaaccccagctacttgggagacagaggccggagaattgcttgaactcgggaggcagaggtagctatgagctgagatggcgccactgcactccagagcctgggtgacagaaaaagactccatctcagaaaaactaactaaataaataaatttgaataacattaggtaagtgaaacaaacaagtactgaagataaaaatgaggataataataagaaatattgaaatagcaaaaaaacaaaaattgtggatataaaaaatgcaaaaaacaattgaaaaatttcttaaaaggaaaaatgatgtaaacatgaaaaagctgaagaaacaaactaggatacacacaaagatatttgtaacaaacacacatacaagcaaaccttcaaaaatcatagataagaagagaattttaggagctgtaatgtaggcagatgtaatgatgaagaatttttgtattcaactgaagtttattttttaccacattcaaatatattgttggatcttttagaggttttatgtaatctcccaaagtaccactaagaaaatatttgtatggatacacaaaagaaaatttaaaaaatcctggaaaaataccaatacaaaaagcaaaaaaccacgaaaaccacagaaagaaaaggaaagacaaagatataagaatcaaataaaacaaataataaaataacattagtaagtttttctctttcagaaaaccatttaaatatatatataattatctttccaatcaagagatatactttcaataaacaggtttattaaaaaattttaaaaatcaagagtcaacttgcctttctacaggagtcagttgagatctactgacaaaaaaagactgaaagtggcaagacagaagtagaatttcatgtaaatatatttttaaattttattattattacactttaagttttagggtacatgtgcacaacgtgcaggtttgttacatatgtatacttgtgccatgttggtgtgttgcacccattaactcgtcatttagcattaggtgtatctcccaatgctatccctccccctgcccctgacgccacaacagtccccggtgtgtgatgtttcccttcctgtgtccatgtattctcattgttcaattcccacctattagtgagaacatgcggtgtttggttttttgtccttgcgatagtttgctgagaatgatggtttccagtttcatccatgtccctacaaaggacatgaactcatcattttttatggctgcatagtattccatggtgtgtatgtgccacattttcctaatccagtctatcgttgttggacatttaggttggttccaagtctttgctattgtgaatagtgctgcaataaacatacatgtccatgtgtctttatagcagcatgatttataatcctttgggtatatacccagtaatgggatggctggatcaaatggtatttctagttctagatccctgaggaatcaccacactgacttccacaatggttgaactagtttacagtcccaccaacagtgtaaaagtgttcctatttctccacatcctctccagcacctgttgtttcctgactttttaatgattgccattctaactggtgtgagatggtatctcattgtggttttgatttgcatttctctgatggccagtaattatcagcattttttcatctgtttttttggctgcataaatgtcttcttttgagaagtgtctgttcatatccttcgcccatcaaaaagatggggctgtttgtttttttcttgtaaacttgtctgagttcattgtagattctggatatttgccctttgtcagatgagcaggttgcaaaaattttctcccattctgtaggttgcctgttcactctgatggtggtttcttttgctgtgcagaacctctttagtttaattagatcccatttgtcaattttggctttcgttgccattgcttttggtgttttagacatgaagcccttgcccatgcctatgtcctgaatggtactgcctaggttttcttctagggtttttatggttttaggtctaacatttaagtctttaatccatcttgaattaatttttgtataaggtgtaaggaacggatccagtttcacctttctacatatggctagccagttttcccagcaccatttattaaatagggaatcctttccccattgcttgtttttgtcaggtttgtcaaaggtcagatagttgtaggtaagcggcattatttctgagggctctgttctgttccattggtctatatctctggtttggtaccagtaccatgctgttttggttactgtagccttgtagtatagtttgaagtcaggtagtgtgatgcctccagctttattcttttggcttaggattgacttggggatgcgggctctttttggtttcatatgaactttaaagtagttttttccaattctgtgaagaaagtcatcggtagcttgatggggatggcattgaatctataaattaccctgggctgtatggctattttcacgatattgattcttcctattcatgagcatggaatgttcttccatttgtttgtatcctcttttatttcactgagcagtggtttgtagtcctccttgaagaggtccttcacatcccttgtaaggtggattcctaggtattttattctctttgatgcaattgtgaatgggagtttactcatgatttggctctctgtctgttattggtatataagaatgcttgtgatttttgtacattgattttgtatcctgagactttgctgaagttgcttatcagcttaaggagattttgggctgagacaatggggttttctagatatacaatcatgtcatctgcaaacagggacaatttgacttcctcttttcctaattgaatacactttatttccttctcctgcctgattgccctggccagaacttccaacactatgttgaataggagtggtgagagagggcatccctgtcttgtgccagttttcaaaggacatgcttccagtttttgcccgttcagtatgatattggctgtgggtttgtcatagatagctcttattattttgagataagacccatcaatacctaatttattgagagtttttagtatgaagtgttgttgaattttgtgaaaggccttttctgtatctattgagataatcatgtggtttttgtctttggttctgtttatatgctggagtatgtttattgatttgcgtatgtcgaaccagccttgcatcccagggatgaagcccatttgatcatggtggataagcttttttatgtgctgctggattcggtttgccagtattttattgaggatttttgcatcgatgttcatcaaggatattggtcgaaaattctcttttttggttgggtctctgccaggctttggtatcaggatgatgctggcctcacaaaatgagttagggaggattccctctttttctattggttggaatagtttcagaaggaatggtaccagctcctctttgtacctctggtagaattcggctgtgaatccatctggtcctgaactttttttgattggtaagctattgattattgcctcaatttcagctcctattattggtctattcagagattcagcttcttcctggtttagtcttgggaggatgtatgtgtcgaggaatttatccatttcttctagattttctagtttatttgcatagaggtgtttatagtattctctgatggtagtttgtatttctgtgggatcggtggtgatatcccctttatcattttttattgtgtctatttgattcttctctcttttcttctttattagtcttgctagtggtctatcaattttgttgatcttttcgaaaaaccagcttctggattcattgatttttttgaagggttttttgtgtctctatttccttcagttctgctctgatcttagttatttcttgtcttctgctagcttttgaatgtttgctcttgcctctctagttaattgtggtgttagggtgtcaattttagatctttcctgctttctcttgtgggcatttagtgctataaatttccctctacacactgctttgaatgtgtcccagagattctggtatgttgtgtctttgttctcgttggtttcaaagaacatctttatttctgccttcatttcattatttacccagtagtcattcaggagcaggttgttcagtttccatgtagttgagtggttttgagtgagtttcttaatcctgagttctagtttgactgcactgtggtctgagagacagtttgttataatttctgttcttttacatttgctgaggagtgctttacttccaactatgtggtcaattttgaagtaggtgtggtgtggtgctgaaaataatgtatattctgttgatttggggtggagagttctataaatgtctattaggtcctcttggtgcagagctgagttcaattcctgggtatccttgttaactttctgtctcgttgatctgtctaactttctgtctaacgttgacagtgcagtgttaaagtctcccattattattgtgtgggagtctaagtctctttgtaggtcactaagaacttgctttatgaatctgggtgctcctgtattgggtgcatatatatttaggatagttagctcttcttgttgaattgatccctttaccattatgtaatggccttctttgtctcttttgatctttgttggtttaaagtctgttttatcagagactaggattgcaacccctgcctttttttttgttttccatttgcttggtagatcttcatccatccctttattttgagcctatgtgtgtccctgcacgtgagatgggtttcctgaatacagcacactgatgggtcttgactctttatccaatttgccagtctgtgtcttttaattggagcatttagcccatttacatttaaagttaatattgttatgtgtgaatttgatcctgtcattatgatgttagctggttattttgctcgttagttcatgcagtttcttcctagtctcaatggtctttacattttggcatgattttgcagcggctggtaccggttgctcctttccatgtttagtgcttccttcaggagctcctttagggcagacttggtggtgacaaaatctctcagcatttgcttgtctgtaaagtattttatttctccttcacttatgcagcttagtttggctggatatgaaattccgggttgaaaattcttttctttaaaaatgttgaatattgatcctcactctcttctggcttgtagagtttctgccaagagatcagctgttagtctgctgggcttccctttgtggataacccgagctttctctctggctgctcttaacattttttccttcatttcaactttggtgaatctgacaattatgtgtcttggaattcctcttctcgaggagtatctttgtggcgttctctgtatttcctgatttgaatgttggtctgccttgctagattggggaagttctcctggataatatcctgcagaatgctttccaacttggttccattctccccgtcacttttagatacaccaatcagatgtagatttggtcttttcacatagtcccatatttcttggaggctttgttcgtttctttttattcttttttctctaaacttctcttctcgcttcatttcattcatttcattttccatcgctgataccctttcttccagttgatcgcatcggctacagaggcttctgcattcgtcacatagctctcgtgccttggttttcagctccatcaggtcctttaagaacttctctgcattggttattctagttatctattcgtctaattttttttcaaagcctttaacttctttgccattagttcgaatttcctcctgtagcttggaatagtttgatcatctgaagccttctctcaactcgtcaaagtcattctctgtccagctttgttctgttcctggtgaggagctgcgttcctttggaggaagagaggcgctcggatttttagagtttccagtttttctgctctgtttttttcccatctttgtggttttatctacctttggtctttgatgatggtgatgtacagatgggtttttggtgtggatgtcctttctctttgttagttttccttctaacagacaggaccctcagctgcaggtctgttgaagtttgctggaggtccactccagacactgtttgcctgggtatcagcagcggtggctgcagaacagcggattttgctgaaccgcagatactgctgcctgatcgttcctctggaagttttgtctcagaggagtacccggccgtgtcaggtgtcagtccacccctactggggggtgcctcccagttaggctacttgggggtcagggacccacttgagaaggcagtctgcccattctcagatctcaagctgcatgctgggagaaccactactctcttcaaagctgtcagagagggacatttaagtctgcagaggttactgctgtctttttgtttgtctgtgccctgcccccagaggtggagcctaagaggcaggcaggcctccttgagctgtggtgggctccacccagtttgagcttcccggctgctttgtttacctaatcaaacaactaactcggcaatggtgggcgcccctcgcccagcctcgctgctgccttgcagtttgatctcgggctgctgtgctagcaatgagtgagactccattggcgtaggaccctctgagctgggtgagggatataatatcctggtgtgccgttttttaagcccgttggaaaagcgcagtattagggtgggagtgaccaaattttccagttgccatctgtcacccttttctttgactaggaaagggaattccctgaccccttgcacttcctgggtgaggcgatgcctcgccctgctttggctcgtgcacagtgcgctgcacccaccatcctgcgcctactgtctggcactccccagtgagatgaacccagtaccccagttggaaatgcacaaatcacccatcttctatatcgctcacgttgggagctgttgaccagagctgttcctattcggccatcttggctcctcccccctcatgtaaatattatcaaaacaagaggagaaggggtcaaaataatgttacacaagctacaagttaagttaaaaactgtcatactttataaagtgtatttaagtcaaaacttcaaaaagacaaagaaggacattagattcattcactgggaacctattacaaatttgtatatacatgtgtgtatttatgtgtgtgtgtctcatattggggtttcagctatataaagcaaatactaacaaaactgaataaacacaaagagagcaatacaattatagtaggatatttcaatactccactttctgtaataaaacaagagagaatattagtaaggaaacagaagactagaaggcagtaaaaaaacaattatttctaatgaaggtatagagaacactcctcgacaacatcaggatacacagccttctcattacctcatacaactttcttctttatagaccacctgttaggccaaaaacaaagccttaacacattttttaaaactgaaattttatagatcactttctatgacaaaaatggaattagagtataaaacaataatataaataattgataaatttaaaaatatttagaaatgatacaacacagtattaagcatgcacttgttgaaataactggctgggtgcggtggctcaggcctgtaatcccagcactttgggaggctgaggtgggtgaatttaactccatctcaaaaacaaacaatcgaaaaaggagtaatattgtgaagatgtctatactgttcaatttaatctacagaattaatgcaccatttttcaaatttctcattgcacttttgaataaaaacagcaaatccaaaagtatatggaatctaaagagttaataaagtactcaataatcttcaaggaataatgttggaggcattacaatttctgatttctaaacacatcaaaaagctacagaattaaaacaatttggtatgagtataaaagtgaaaaagtagaacaataaaacagaatgcagcacatatgttagctttcacataattattgcagcattgttactgaaagccaacaggttaaaacaatacaaatttctgtcatcaaatcattcagtaggtagaaaaatactggaatctcattcagttttcaaatagcagaaaatagtctaactattaagataaatattgatgacattatgcaaaataaaataagccagccagaaaaagacagagattatatgagatatgtaaagcagttatactcctagaaacagaaaacagagtggtgtttgaaaagtgccacgaaattggatgaattggtagttgtttaatgtgtagtgagatttagctttgcaagataaaaacattctagtgatgttgcataacaatgtctatataattaatatgaccaaactgaatatttagaaatatatacttgtcactctaactctcaggcaaaactgcagtggcattatctcagctcactgcaacctccgcctcctgggtttaagtgattcctctgcctcagccttctcagtagctggaattacaggtgatcaccaccacgcctggctaattttttgtattttagtagagacagggtttcaccatgttggccaggatggtctcaatcttctgacaccgtgatccacccacctcggcctttgaaagtgacgggattacaggcataagccaccgcgcccagcctagaaaattttattgttaattttgttatgtgtttttgacacataacgcataagtaaaaataaacaataatacctaaaagagatacagagtaattattgtttttaaattatcttcaaatccaaaaatgtttctctggcacaaaattaatatagattcaaaaataaatagacgctgaaattgggagagattttatgactactcacctagacaggattaaaaaaactgttacaggccaggcgaagtggctcatgcctgtaatcccagcactttgggaggccgaggcaggcagaccacctgaggtcaggagtttgagaccaacctgaccaaaatggtgaaaccctgtctctactaaaagtacaaaattagccgggtgtggtggcacattcctgtaatcccagctactcaggaggctgaggtaggagaatggcatgaacctagaagttggaggtttcagtgagctgagatcccaccattgtactgcagcctgcataacaagagtgaaattccctctcaaaaaaaccaaaaccaaaaccaaaaccaaaaacctgttacaccatacctacaaaacaaatatacaagtgacacaaagctacagggataatatttatacaggcaaagaaacacagaaacaattatattggcaatagatacatggctttttcatatttaattttgctcttcactgtcttaaattgtacagttaaatattgttacatacaattataaactaaaaaatatattgttatatacaattataatataaactaaaaaatcaacacataattaaatgatgtgatgtgacattcccaaaaatatataacacaaaatattaaattacaaaaaaattaaaacatgggatgtaaaacaagtagatcaatgtattcatgaaaggactcttaaaatataaggtaaagtaatacagaggttacttgaagatttaaaaaaaaaaagctgagaacttcccaaattttgatgtaacaacaacaaaaacttctaaccagtaatactcgattcaaaattattttacttcaaaaagaatataaaaataaagactttccaaaataaaagttgagactgttcatcaccattggcacagtcctacaagatataatatacagggttgtgctccctggctcacgcctgtaatcccaacactttgggaggccaaggtgggtggattgtctgaggtcaggagtccaagaccagcctgaataacatggtgaaacaccgtttgtactaaaagtgcaaaaattatttgggcatggtggcacattcctgttgtcccagctactgaggaggacaaggcaggagaatttcttgaatcaaggaggtggcgactgtaatgagccaaaatcatgccacggtactccagcctgtgacagagaaagactccatctcaaaaaaaaaaaaaaaaaaaaggcccagtgcaatggtgcccaccacactccatcctgggccatagagtgagactcaatctcaaaaaacaaaacaaaacaaaacaaaaaacaaaatcgaaatgattattcataaaacctttaaagttcttttatagaatataaaaaacaatatgtaaatgtgcataaatcggctgggcgcagtggctcatgcctgtaagcccagtgctttggaaggccaaggggggaatcacaaggccaggacttcgagaccagcctggccaacatggtgaaaccctgtctctactaaaaatacaaaaattagccgggcatagtggtgcacacctgtaatcccagctacacgggaggctgaggcaggagaatcacttgtacctgggagatggaggctgcagtgagccaagattgtgccattgcattcctgcctggacaacagagtgacactctgtctcaaaaaaaaaaaaaaaattctgcctaaatttgttaatataccatataaaataattttaatatcaataaaaaactggaaaatgtagagacatagtttttgtattaaattgaagttgttataaaattaaaacatattgttttaactttaagatgtatgtaatctccagctttcaagatgattacaaagataatatttatagaaagtgtgcaaaagaaaataaaaaataatgcatgccagtacaaaattaaataaaaattaagaaagtaaaacaggaaatgagaaaaataaaactactagaaacacacaaaacaataataacgtaactggaaataacaacttcatttctttaagcaatcattttaaatataaattaattaaactacttaataaaataaaatgtaatcttaggactttggaaggccaacgtaggctgatcacttgatcccaggagttcaagaccagcctgggcaacatggcaaaactctgtctctacaaaaaatacaaaaaagctatttgggtgtgatggcacatactagtaacccagctacttgagaggctaaaatgagaggataatctgagtttgggaggtctggatagcagtgagacatgcaaatcagcctggttgacagagtgaggccctatttcaaaaataaatgaggccaggcgtggtggctcatgcctgtaatcccagcactttgggaggccgaaatgggcagatcatctgaagtcaggagttcaagaccagcctggccaacacggtgaaaccctgtctctactaaaaatataaaaaaattagctgggcatggtggcgggcacctgtaatcccagctactctggaggctgaggcaggagaattgcttaaacccaggaggtggaggctgcagtgaactgagattgcaccactgcactgcagcctgggcaacaagagcaaaactgcatgtctaaataaataaataaataaataaataaataaaattatatagagaaaaagaaatagaaagcctgagtggtttttttaaaaagcaatcagtatgctgcctataagagactcattttagcattcagtcaaataggctgaagtaacagaatggaaaaacgtatattccatgaaaatagtaaccacaattgagtggggtagtcataattagacataacatgctttaagtcatgtactactatgagacaaagactgatattatattatgacaaagttagttgatgtagcagaaatctataactataatatttatctttctatatgtatatgtgtatataacatcagggctccaaaatacataaagcaaatattgacaaaagtgaaggaagacatacatagcaacataatcattgtagacatcaagaccccatttgcagtaaatggaaaattcagaaaaaaaataagaaacaggaaacttagaaaacattatagactatgttatttattttgcaaatagaggaataattgagagtacgttatttataacaaaaaggggtatatttggctcacagtttggcagactgtataagaagtgtgtgtcaacaactgcttctggtgaagatctcaggaaacttacaatcatggtgaaaaataaagagtaactggatgtattatatggtaagagacagagcaagtgtgaggtgaaggagccaggttcttttaaggaacctactctcatttgaatcaatagagcataaactttttggttaccaagaaaatgtaccagccattcatgagaaatttgcccctgtgacccaaacatgtcccaccaggtcctacatccaacattaaggatttatactgcagcatgaggtttggagaacatggatatccaaaccatattatagaccaactaggcttcacagatgcatacaaaactttccagtcaaaaccaagataatacaaaatattcttatttgcatctggtgtattctgttaggacacataccaagttttattaaattcaaaaatactgattgggtgaaatggctgttgcctacaatcctaacactttgggagatcaaggtaagaggatccattggtgccaaaagtttaagaccagcctgggcaacgtagtcagatccgaacactacaaacaaaccaaccattaaacagacatctagtgcgtatctgtagtcctagctactcagaaaactgaggtaaaaggatcacttgagcccaggaggctgaggctacagagagccaaaattatgccactgcacttcacacgaggtgacagtaaaatcttgcctcaaaacaacaaaaacaatcatttaaaaaagactaaaattacacactgtgtgttttctaataaaaactgaatgaaactaggaattaaaagcaaaagtcaaactggcaaattcaaaactgtgtatatgaaacacactcttcaacatattcttgctcaggggtcaaaaaatttcatttttcacaaaatgtcaataaaatctagagttaaaagctacagaacataaacaatgtgatactgacacaaagataaactgatgaaagaacagaatggagagctcagaaatgaacccttctgtatatgatgaaatgatcttccacaaagttgccatgagtaaaaaatggagaaaaataatctcttcaaaaaatgatgttgaaaagtgaatatcaacaccgataaaataaagttggattatttccttgaatgttacaaaaatatatttttaataaaatattatttaaaatattttaattttttaatattaaattcaattatttaaataattaaattattaattttaattattaaaattattaatttaattattaaaaatagtttaataaaataactaacaaatcttttaggaaaaaatacgggaaaaagacatgacactggtttggcacaattttcttagatacaaaattaaatgcctgagcaacaaatgaaacagaaaagtttacactagacttcaaaatttctgcatattagaaacaattcaagagtaacaacatcccttagaaaatgggtaaaacatttgcatattacatgtgacagaaattaatattcaaaatatataaacaacccttaaaactaaacaatgatgaataacttaatttagaaatggacaaatgaaatttttattagaaaagtacacaaatgagaaaaagcatttgaaaggacacagaaaattactagtttatagagaaatgaaaaaaaaaaacacaatgacaaacaaaatcacctcacacacattagaatggccactataaatttttttaaaaacaccaaatctgttgatgatgcaataaaaatgaaacctaagttgaatgttggtggataacaaaggtgcagtcattattttaaaaagttataaatgtttctcatttataaatctatatccaaaatacgtaaaaaaagccaggcacagtggctcaagcccgtaatcctagcaatttgggaggccaaggtaggggcagatcacctgaggccaggagtttgagaccaggctgtccctgtctctactaaaaatacaaaaaactagctgggcatggtcgtgggcgcctaaaatcccagttacttgggaggctgaagcaggagaatcgcttgaacccagaaggcagagattgcagttagacgagaccacaccactgcactctagcgtgggtgacagagtgagactccatctcaaaaaaaaaaaaaaaaagcaacacaggacctggaagacatatttgaaaatctatctttattataccagtattcaaaaaagccaaaaggctgaagcaacccagatgtctcttgatttaaaaatacgtcaaaaaatataacatatacataaaatggaatattattccaccttaaataaaacaatcttgtcacattttaagataaacattgagaatattatgtcacttgaataatccagtaacaaaattatggatactgtacgattccacttatatgagataccttaagtagtcaaaatcataaaaatagaaagtggaaattttgtctgtcaagggctggagagagggtaaaattagcagttgttatttcatgggtattgagttttagttttgcaagatgtaaaatttctaggagtcttttgcataacaatgtgaatatacttaacatgcctgaaatgaacagcttgtttattttgagacagggtctcactctgtcacccaagctggtgtgtagtggcacaattttgactccagctcaatctcccatgtagctgggaccacagctgcacaccacgatgcctgactcttattaatttttttttttatagaaaggggtctccatatgttccccaggctggtctcaaacttctgggctccaggaatcctcctgtcttggcctcccaaaatcctgggattacagaagagagccacaaccatgcctggccctgaaatatacacttcaataaatttaagatggtaaatgttatgttacgtgtttttaaaacaatgtttaaaaaaaaaaactgaaaaaaatccagaattattaatctttttgaaaattaccttcaaatcacaaaactgtttctctcacaaaaggaaatatatattcatcattaaacccatgttgaaaataagactatcttcatgactactcacttagacaagataaaactaccatcaaaaatcagctaagaatataagataagccataactaaaactggggtcatatttatagataaacacacacatacatatgtaatctgattgtgatagacacgtgcaatttatctcttaagcctcaaatggacttaaagtgtacaaacagaattgcaaattctctaaaattataatacataagtaaaaccaataggcacaataaactgatgttaagaaacctacactgagaccaggcgcagtggctcatgactataattgcagcactttggaaggccaaggtgggcagatcacaaggtcagaagtttgagattagcctgaacaatatggtgaaacaccatctcgaataataatgcaagaattggccgggggtggtggcgtgcctgtagtcccagctattccggaggctgaggcagaagaatggcttgaacttggaaggcggaggttgcagtgagctgagatcgcgccagtgcactttagcctgagcaacatggcgaaacttcctctcaaaacaacaacaacagcagcaacaacaaacaaaaaaactacactgaagaaacatgctaatacagaacttcaaacaataagacaaatgtttactcataaaatctggtgtaacacatggaagtatcattacgaaaatttgtcaggccaggcgcggtggctcatgcctgtagtctcgcactttgggaggctgaggcgggcggatcacctgaggtcaggtcaaccagtctgtcaacatgatgaaaccccatctctactaaaaatacaaaaattaccaggcatagtggcacatgcctgtaatcccagctacttgggaggatgaggcatgagaactgcttgaacccggaaggtgaaggttgcagtgagccaagatcgcaccactgcactccagtctggatgagagagggtaactccttctcaaaaaaaaaaaaaaaaaatttgttgaagtaactgcaatctttaactagtattatgtactcatcatatacaggtattttgaatcattggcatgcactgtgtagcagtaaaattttgagaatatgcagtataattataaatagattctaatgagaaacttaataaattagcatttaaaagaaactggagtttctttttatgttttaaatatatgctattcttacacaaaacgaaactgctgtattctaactttagaagcaaagaatagccttacattgttaaacacagaaaaaaatatatatatattttggagaatagggttagaccctctgatatgtaaaacaaatattaggaaataaactcattatttatatacagggtgaagaaagtagatgaaaattccataattttataactacttataactagtaactatgtttatatttagtaactattttcataaatatggagtgcttactaattatctaatttactttcagcataccatgcaaattctagcatattatcctaaataactgaatctaaaattacaaatttgaaatagaatatagaaagaaaaaaggtataaggagagtgacatcagtaagatgaaaataataaaagtgctctattttcatatccccttatagcaaaaaaagtcagccatccctgaccaaaaatgactttatgagacaaccaggcattatggttcacatctgtaatgacagctacatggtacattactgttggagagaaatgcttcaggccaggattttgagaccagccttggttatgtagcaagacgtcatctccaaaataagtgcctctaagagagatgtgagatccagggatgcagttgtgaaaccctattaaagctgaagttcgagacgtgttctattcagaaggcaggccctcattcaggtgggaaattacaggacccctgttcttggctacagaccaggatagggttcacccaacttggtcccactgagaattctgaacttactctgtagccaccacaaactcctcccaagccagagtctggcagaggtcctgctattccagagacctggaggaaggcatctatttacagccatgtaggcaggcctgcataccttggcctttaccatggtccctgaaacagttcactgactcagtttccgttacacgagccacagttcatggtcagtcctgcctatatagaaacccacacagttacctgaggaaatgctctctggtactcactgaaagccacactcatccacatcctgatttaaggcccagcatctgcagacctgactgcaaaaacatgccctagtgtctgccctacagagcaaagtcccgaaggatatgcagtctgtccaaaaataaaatggaaattacaactacccaagcccctgtaacaagccaactgaagatgaaacctaatggagacccagcagccttgtgaccaagctacaacccctcttcactacaaattcagagggcatctcatcaccctaagggcccaataaaagaaaatctttacaatctaaaatcagtttatgaaaacttgaagaggtgtctgctccatcaaattcaaacaccaatacaaaactatattgtgcccattttcaatgcttctattttaatgtagcactggaagtatgggcagaagaattagtcaaagaaataaataaatccattgaaattaaaaaataagtaatcttatatttaaaaaaccataaacagtacattaaaacctctctaaactaataaatacactcagtaaattagcaaaatataaaattaacatacaagtatatctatggtttcatacacttaaactatctgacaaaatagaggaagaaaattttattgactataccttaaataataaatttctgaggaaaatattaaccaaggaggtaaatctttacaataaaaaaaggaaaagttagaaaagatacaaataaattttaaaatattttgtctatgaattgaaaacatgaatattattgaagtgccatattatccaaagtaatctatagattcaataaacttcctattaaaattgcagtggtactattttcacaataatggaaaatacaattcaaaaatttacatgaaactaaaataaactttgaatagccaaagcaatcatgaggaaaataacaaagaggaaggatgtcataatttcaaactatatatttcaagcctagatagtaataaaaacagaatggactgtgcagaaaaatgaacaaaaaaaaattcaacagaaactattactctcagacatttcagatctgatgcaaagagaactttgagagtaattttagtttctcaaaatcatgcagacatttgtgcgtcccaaaaattatggaaaagcagccacactgtgcagtctcttatatgtcatgaagaggactttggctctcactgtgaacttgaaggaagctcactgaaagaaaaggaaaatccttagagaatttaaaagcataagacagaagatgcccctttgtaagcaaaattaaaaaagaaaaaaccaaacaaacaaacaaacaaaaaatagctgcccaagaactatttcctttggaacacagctccccaaatcacactttaaggactggctttctctttgaccttgggaccccttatctgtgtcatctgttgtattcattttcactcacacctacctgagggtttggctatcatctcatttctcttcatggtcaaaggttttcttccttgctccagacaggtgatcaggtctggcttagaaacagtaatacctgttttattaaaaataaataacataaatcttgcttatgttctccaattacaagctagtaatgtgctcagcacagaggatgtgataaaatattctagtaaattaatacaaaaatactaagttgtaacagaaatttttaaataattagaaaatactttcaatttgtaggtttcttaattttactacctggtgctactgaatcaaaaattggtggtggcaattagattttcaggtggagcaacaatattttatgccactaaatttctggaattaccactaatttagagtgaaaaatacagctcaactcaggaaagtggaaagtttggattaagataaaacatgttgaagaaattcttttctaaacgaacaaattctgaagattttctggaaaatggggatctgaaactcttttatgcaaagaataaattactaaaaaacattctacaaaaaataaataaataaaatctatagggtatattatgtactcaagttatcctcaccaaggaagaccaggttactgtagttctctaacatcacattcctatataaattccgctgtgcagtgtccaggcaatgccactcctccagagagaattctatggccacatctctaaattgcaatggtccctgaaaaacacacacacacacatttttaccaagtggccatgggcggaatttttaatttgacttaaggtgaaataagagagtaaagagaactggttctgacttataggactgactaaaattatccaataaaatgatttcaaaacagaaatattctctaatgtattctctaactctgagaagaaagagcagcataagatccacaacatcaattcatgtatgtttctagataataaagtataaaattaagggcaagaacaggaacatgtaaatttttcagtgctatagttacattatacagaatgagttgtgaatatttttcagatggaaaagacatgtttagttagaaggcatctctaaagttttaatatgtacaataagctgaagacatcgttatgcaggttttttttcccccagaagatctggaataaagtctgatttatttatttatttatttatttagagatggagtttcgctcttgttgcccaagctggagtgaaatggtgccatctcagctcaccgccacctccgcctcccgggttcaagcaattctcctgcctctgcctcctgagtagctgggattacagacatgcatcaccgcacccggtaatttttttcgtagttttagtagagatggtgtttatgttggtcaggctggtcttgaactccctacctcaggtgatctgcccactttggcctcctaaagtgttgggattacaggtggagaaaccacacctggccaatgtggtgaatttctaataagctcaacagtaatgccaatgtctttggcccaagaaggatattttgtcaaacatttagtaagtggaacagcctgtgtttttcccactttttctagcctgtaaacaaacagccctcatttaccaaagaaacatgtgtagaaaaaaaaataaggacagttgccagattaaatgtgatggtttatgcacatcagctgcataaagatacgtaataataaagaggaaaaataattaactctatagtgaaaaaaatatgtcccagagatctttaaccaattaattaatggttaatgcattaactgttaactgcactaggacaatggttttttttttttttttttttgagacggagtcttgctctgtcgcccaggctggagtgcagtggcgcagtctcggctcactgcaagctccacctcccaggttcacgccattctcctgcctcagcctcccgagtagctgggactacaggcacccgccaccatgcctggctaattttttgtatttttagtagagacagggtttcaccgtgttagccgggatggtctcgatctcctgacctcgtgatccacccacctcggcctcccaaagtgctgggattacaggtgtgagccactgcgcccggcctaggacaaatttttatgatgtgctaatgcacacagaagaacacagcatcactgttgtaatattcctcccaaaaaaagtaaattatagtccgaatgtaaccataaacatcagttttaggccaggcatggtggctcatgcctgtgatagcaatttgggaggctgcggcgggaggatcacaaggtcaggagttcgagaccagcatgactaacatggtataaccccatctctattaaaaatacaaaaattagccgggtgttgtggcaagcacctgtaatcctggctactcagcatgctaaggcagaattgcttgaacctgggaggtgaaggttgtggtgagccgagatcatgccactgtgctccagcctcagtgacaaagccagactccgtgtcaaaaaaaaaaaaaaaagaatcatcagttgtatacaaactttaaaatacagaaaactctatgttcagtaacttttagtagtaattttaagtaggcttcatttagcatcctaaagagcaggtatctcctaataatttttttcagaactttctgggtaataaatgccatcccatttaaataagcattttcttcttcttcttcttcttcttttttttttttctgagatggagtctggctctgttgcccaggctggagtgcagtggcgcaatctcggctcactgcaagctctgcctcccaggttcacgccattctcctgcatcagcctaccaagtagctgggactacaggcgcctgccaccaagcccagcaaattttttgtattttagtagagacagagtttcaccatgttgaccaggatggtcttgatctcctgcatgatccacctgcctcagcctcccaaagtgctgggattataggtgtgagccacggcacctggcctaaatcagcattttcttaatcctcttctgcatagagctaatggaacacacagctggagcctcaacattacatgttctccatctttactaaggaccacagttttccccaatagaaatcttgagtatccacatctttccatgttcaacagccacaaagggaacatttttaatattgcagatcataaattcttgctgagaattctgcatggcatataagaagctatgatgcggagaataaggagaaggctctgaaatataggaaagaaatatttttcagactcttgactatcgtaagaatttaaagaagtaattaagccaaactcattagggaggaaaaacacaagtagacaagtaaaggtttgtgagtactaaacgcatggcagtccaggaggcagagtcgacatagctcttcatctgacacatgtttacctgaagaaaagccacttttttttctttctcctccttctctggattccttctcagatgagattctctagacaagttacacctgttatcttgagactatgtctttaaaggtgtcagtaccacatgtttacctgctagcataacatcaactggcagaaaaataaagacagaaaaagtccacccatttctgtcctttacaacagaagacattcaggaacaatgagctgctccatgaagataaaaatataaatttctctttgctgtcctcagatgctctcccctgccacggacaccagccatttctgctacagtaatggaaataagcgccacactgacttgtccctaccaaacgcaaacagaacaggccctgtgaccaccctttagggcaaaggtggaacttaactctcatgaatgtattttgaacccctcatacttggttctggtctcaccttagagtcacataagggactccatggatgcttccacccagaacaataaacagaagctgtgcggaggacacaaggaatttctgcaaattggccatgtgattctaatgagaagcctgggttgataaccacggagctaagcattttctctcaagctttaatgagcttataaatcacttggtaattttggccccaatttatgtaatgtgactctggaggtttgaaaagggtccatgaatgggtgttttaaacaagttccctttcaatgctgatgttgctccccccgccccttggcgcattagcattagttagagaaagcaggtacagcacaaggtctcttattacttagcactcttgtcacaaccaaatacttctcgtacaaataaggacaacccatctccatccaaaagttttatatcctttgctggttctttaaagtttacagaaaaaacagaaggcagcaatgtctgaagaagtctggatttaaaaaacaacatgtacacacgtactaatgcaatgtttattaagcaggtactatgtgctcaagagtatgatacagagcactgtgctgggcgtaacatattacgtgatttaattctcataacaccctgggagccggtactaagtgtatgataattttcaggatttaggtaaagggcccaggatttttattgcttcttctgtttctctgccatcaaatttgttaaaaaaaaaaaccataaaaaattaaaactaaatatagacagatgaaagaaatatggaaggcaagagtttaatgtagttcagagaaaattttattctgtttatatttacatttttgtgacttgtggagcaattactggatatgcaagaatggaaaacaagtccctaaatagaatgtctctgcaaacactggttttaatataaaatttaaaaactaagaccctataacacataatttatttttcccatttatctgcttttggatttcaggaaattctaagcaccagctctagaaagacaacaggattcaccagccaaaactctgacctcttctacctgtgagacaagactccagggtagggtcagacgtaaataaggcctccaaaaagggtgaatctcaacagaactgggtcaggaagtggaccctatgtagaattctgttctctatgtcactggggtatttccagttttgttttttctaaacttacctaaaataaacttaaatcccagagtctgtgtaattttaatcttttccagccactgccctgtcaactttatattatatgctaatatgcaatttaaacaaatcccttaaggttttcaagggtaagtttattaggaaacaaatatgttcacttaacaggatgaaagaaatagaaatacggctgggcctggtggctcatgcctgtaatctcaacactttgggaagctgaggtaggtggatcacgaggtcaggagttcaagaccagactaaccaagattttgaaaccccgtctctactaaaattacaaaaattagctgggtgtggtggcaggcacctgtaatcccagctacttgggaggctgaggcaggagaatcacttgaacccaaatgtcagagtttgtggtgagtcgagattgtgccactgaactccagcctgggtgacagagggagactccatatcaaaaaaaaaaaaaaaaagaaattataacaacaattcttctgttcataaatatcctttcaagtacagacatcagaagtcacaacaatataaagtggcaaataatgtccaatattttggacatatctatttgttataccaaccatatgatgcataattcaagtatttatctagttgctagtctagactaagtttctggattgtaggaaccatggctgcttcatgttttattttaacggtcatatgaaatggaagctactagtttatctgtttgggtctccagatctcctccttgtttatcatcccagtaccaggaaactggagaaactctcatctgggtaccaacctaagacacctcttgtatgaggggatgaacaaacaggatgattcatttctcttacactgagaaagaagcagaattaaccactcttgtcagcctgacacaattctgctctggacatcctcaaatgtctcaaagaccactagatgattgtgagagaattcccagtgacctggggctggtggcccaatgataagccaggctagagactcaggctgattctaaataggaaatagaactgccttggtggagctacagaacctggatcacctgtcctgatttgctagctcttgtgtaagagaaagaacacaaatactctactccagtatcacattttacaggtaaatatagttgtggtcataactggatattttgtggccttgttctctcactcttaagatgctttttttttacacttacacatattctgtcatcagattctatttccttctggaggttctcacatcactgtagcaggtcaatgaacaagatgtgaaaaatctcacagaaccacactcccaaatgggagctgtaagctgtctaggttgacatctcacaatgcagaaaatgccttttcttagttttctgtacattctctatccaaagtccggtccttttttgtaaatcccaggcagaggccagatgttatctgcagattctaggtaggatccacctggctctgcatcctttggtgttacagcaagtggagtacaaacgaaggagagatcccccccatagaggctgctctagcacattctaaatgataagtctacatgaaaaaaaaaaaaaagctgacacaacatgaatataagtagacagtttatttgggtaaagtttacagattatatataacctgcgagcaaagattaaagttgcctggaatctacactttgagtagcagcatttacaagaagatttgtaaagacaataagagaaacacagagtgggcaaaattgtttgtcagaaatttctatttatttacaaaaataacattgattattgattagatacatatcattatagtttagggtatgggatatagtgtccaatgtagcattattagtttaatttatagctacatgtggcaatagtgaacagtctcaaaagatgaatacagaattcaaagggaggagaaagacataattgcacttttattttaacgtctctgagtttgataactaaaaggacttgcatttttcagataaaagttttttaattcccaaatctcaagacctggattcaaaatatggagctgcagatttagggcttgagtggctggagtagcacgcatgttacctgcacatttgtgagctttttagcaagagaaggaagaaagaaatggagattttcttgtctacatgtctactcactacacacgttactctacttgggtttgttggccccatggtctctgaatcagtttcaggtttgaagataaaagagtcactgaaagaggtaaaatgattgattgctgccctgtgaaatttatagaaatctgatctagactctctagaagtgactgtagaggactatagataagaaataggcagaaacacaattcggcctgcacatttagggtatggcatgcacttttctgcacaagtgtgaatttactggaagcctgagagggaatgtcccctcgagtaaattctggttggcccttatgtgtttatatcatgtctggtaattctagactgtttggaaacaataattaaaagaaaaattttctccagccccagagaaactccacaataacagaacagaaagaaaatggttttattacacaattaaacttgaatgtgacatgcatcagtcaatctgcttaagagactgcaaagatagaaagatggtcaccataattagttcacaagtagaagaatttccagcaccatgtcatacatagttcatcctaaattcacctggagattgaagaggacatctgtgtatgctaattacttatattcaatgacaaataaacttttcacctctttataacaggtggtagtttagcaggataatcgcttgaacctgggaagcagaggttgcagtgagcccagatagcaccactgcactccagcctgggggacagagtgagactctgtcccctgccctcccagcaaaaaaaaaaagaaaaagaaaaaaagaaaaagaaaggaaaagaacagggacatattttcagaagaattttataaagtttcatttccatctctgctgttctctcctctcctagccattgaatgggggtctatattgaaatacatcttacaacttccaacaacacattttgatgaaaaaatagaatctgactgtgttcatatactggaatatattagaacttgcaacatagctaattgaagagctactatagtttttgggtggccacatcacctgtctttatttgtcctgtaacagcagcatacaaatttagtgaaataaaagatactaaaattgtgtttcctcataattatcctgaatgaataaagtaataaacatgtctgactaatatctactaactgtaacaatttggttgtaaatattctttggatattagatataaatatctaagtatgaacaattttaatgaactagtcataatgtatgtagcattaaaaaaattaaaaccatacatcagttaggctgggcgcagtggctcaagcctgtaatcccagcactttgggaggccgaggcaggtgaatcacgaggtcaggagttcaaaaccagcctggccaatatagtgaaaccctgtctctacaaaaaccatataaaaaaattagccggacctggtggctcacaactgtactaccagctacttgggaggctgaggcaggagaattgcttgaacctcggaggcggaggttgcagtgagccaagatcgcaccactgcactccagcctgggcaacagaggccaggcgcggtggcttacactgtaatcccagcactttgggaggctgaggtgggcggatcatgaggtcaggagattgagaccatcctggctaacacggtgaaaccccgtatctactaaaaatacaaaaaaattagctgggcgtggtggcaggcgcctgtagtcccagctactcgggaggctgaggcaggagaatggcatgaacccgggaggcggagcttgcagtgagccaagatggtgacactccagcccggacgacagagtgagactccggaaaaaaaaaaatccatacttcagttaaaacattttatatttcaaaagcataaataacagtattaaaataaccatttaagtgattaattcaaagtaaatattgtggctttgtattcatactattttagaaaatactgtttatggctcacgcctgtaatcccagcactttgggaggctgtggtgggtggatcacctgaggtcagcagttcaagttcaagctggcaaacatggtaataccccatctctactataaatacaaaaattcagccaggcatggtgatgcatgcctgtaaacccagctactcagggtactgaggtaggagaatcacttcaacctgggaggcagcagttgtagggagcagagatcacacaactgcactccagcctcggcaacagagtgagactgtctcaaaaaaaaaaaaaatgaaaatatggtttaatttatatgaatgcagattatctacaaagataactgctaattgctctgaaataataaacagaaagcaaggtacaactacagactcaactgttcagtttataccctgaactgttcttgctttcgcagtataagtacttcagcctgcaaatattggatagttaccttggattatcaggtttctgtcaaagaaactgagtatcatttagtctttattattctgtattgctacctttactcctatctttgtgctaagcttctgtgtgctcttaaaatgagcttgtatctaaacaaatctgtgtctaccttaaaggaataaaaatcaaaaaaataaacttttcggaaccaaaaacaaagcaatacatcttaagtacttataataatctggagtcagaaaaaatgacaaaacttttatttagctgttgacatgatttacatatatttcaaacaagcagagaaaaatatctacatatattctaaatcccttaagaaaagagggaatagcggccaggcacggtggctcatgcctgcaatcccaacactttgggaagccaaggcaggtggatcacaaggtcaggagatcaagaccatcctggcaaacatcgtgaaaccccgtctctactaaaaatacaaaaaaaagaacaaaaaaattagctgggcatggtggcgggtgcctgtagtcccagctacttgggaggctgaggcaggagattggcgtgaacccaggaggcagaggttgcagtgagccgagatcgcgccactgcactccagcctgggtggcagagcgagactttgcctcaaaaaaaaaaaagaaaagagggaatagcaaaatttttttttggaactttttgaagagtttgaactcttggacatctgaaattagcacactgtatgcacttgaaataatgtttacaggggaaaaaccagaagagagaaagatatatgaaatccgtaagtgcacaagaccaacacaacagaatagagagcccagaaataatgtcaccctcctacactcatcagatttttgacaaagctgacaagaggaatatgggaagaattctctctttaataaatggtgcaggaataactacctagcactatgtagaagactgaaactggaccccttcattacaccatatacaaaaatcaactcaagataaattaaagacttaaatgaaaaacttaaaattataagaaactctgcaagataacatagagaataacattctagatatagacactggcaaagacttcatgatgaagctaccaaaagcaattgcaacaaaagcaaaaactgacaaattggacctatttaaactaaagagcttcttcacagcaaaggaaactataaatagctcaaacaaacaacctacagaataaaagaaaatatttgcaaacgttgtctatgacaaaggtctaacatacagaatttattaagaatttaaacaagtttacaagaaaaaggcaaacatctcattaaaaagtaggcaaataacacgaacagatgcttgtcaaaagaagacatacatgtggctaacaagcattattaaaaaaaaaaaaaaggtcatcgctagtcattagagaaattaaaagaaaaaccacaatgagataccacctcacacccatcagaatggctgtttttcataagtcaaaaaataacagatgctggcaaggttgcagagaaaagggaatgcttatactcttctggtgggagtgtaaattagttcaacaacagtaaaaagcagtgtggtgattcctcacagaactaaaaacagaattatcaatttgacccaggaatctcataattgggtatatagccaaagaaatataaattattatattataaagacatattcacatgcatgttcattgcagcactattcacaatagcaaagacgtagacaggccctgaatgcctatcactggtagacaagataaagaaaatatggtatggtcagatgcggtggctcatgtctgtaatcccagcattttgggaggccgaggcaggtggattgcctgagcttagaagtttgagaccagcctggtcaacatggcaaaatcctgtctccacagaaaatacaaaatgaaaaattggccaggcatggtaatgcatacgtgtgtagtcccagctacttgggaggatgaggtaggagagaactgcttgagcctgaaagatggaagctaaagtacgccaaaatcatgctatggcactctagcctgggcaataagcctatctccaaaaataaaataaaataaaagatttagtaaatacaaaatatggtacataaacatcatggaatactctgtggccattaaaaaaaaatgaccatgtcctttgcaataacactgatgaagctggagacaattattcttagaaaactaatgcggagtccaggcatggtggctcacgcctgtaatcccagtactttgggaggccgaggtgggataatcacctgagttcaggagtttaagaccagcctgaccaacatggagaaacccctctctactaaaaatacaaaattagctaggtgtggtggcatgcgactctaatcccagctacataggaggctgaggcaggagaattgcttgaatccaggaggcgaaggttgcggtgagccgaggtggcacaattgcactccagcctgggcaacaagaacaaaaatccatctcaaaaaaacaaaacaaaaaacaaacaaaaaaaagaaaattaatgcagaaacagaaaaccaaatgcatgttattatttataagtaagagctaagtaataagaacacatgaacacaaacagaacagacactgaggcctagttgaggggggagggtgggagcagtaagaggatcagaaaacatacctgttcggtggtatgcttagtacctcagtgacaaaataatctgcacttcaaacccccatgacgtaattttagttgtataacaaacccacatgtgtacacccaaccaaaaatcaaagctaaaaaaagaaaaaaaaaaaatccctgcgtgggagagagtgcaatgtaggtgaatggactgattttcattacagatagtggcccaggtggggctgttttctgatttatctttgtttgcatgcagacagatgagattataaccgggaggtccagaaccttaggttggtggaaaaaacaggttggtgcggcagattctgtatctaggggtggggatatgccaggagacctgtagagacttttgggttcttggcaagaaacgctaggatcaaaaatgccatggtgaagttcctgagggtggtgcccagtactgggaggagtgaggacatgtcaatgtctactgtgtgtgtttaggagtgggtgggaatcctgtggtggcagctacaagaaaacagggtctgtcatcagaactctttcctctaagttttcagtcttctgtcaccctggaagaagaccttaaatcacaggacaacaggcagtgtgacagcctgtgtacaggagagcagagcctcccattttcaaatacccagagctttgttccaggtctggccccagtgatatcttttttctggcaccaaatctatagagtttgctgaatatcaaacaattctccaacaccaactcattgcctaataattgaattctgacaccacctagagacagcacagaccctgatccagggctgggtcccacaacattgtcctcactgcagaggccaatcaaaaaccccataggcccatctatgcttctgagctactgtttgaaaactgaggactcccaaaacctccctgaagttcaataatttggtacagctacttacagaactcagcaaaacattgtagttatgtttaccggtttcatataaaagatgcagcccaggaaaagccaaatggaagaaatgcatagaacaaagagatggggaaagatgaaacacatagaaaatcctggaaaatatttgtgattaataaaattctccaccttttgtgtgctccaggaacagtatacggaaagaaacgcctttctcattatgacttagatggtgctctcttttcttacctatcacacagccagacacacactctgtacattttctcctttttctcattaagaaattcagctgaatttgtcttcagtggtcaaaataattttttttttttgagatggagtctcgctcggccacccaggctggagtgccttggcaccgtctcagctcactgcaacctctgtctccatggttcaagcaattctcctgcctcagcctcccaagtagctggcattacaggtggccaccacaactaccagctaatttttgtatttttagtagacacagggttatcaccatgttgaccaggctggtctcaagctcctgacttgcggtgatccgtccgcctaggcctcccaaactgctgggattacatgcctgagccatggcgctcagcctaaaatatttcttaatcaaactttacttaagtttatctccatccctcaggctagtgagggatggagataagccatctccaatgtaggagaaaagcccttttctgcctacatttttgcaacccatgaagattttttagttagctggtacttcttcctgttgcaatacttcttaggaattcattttttttttacataaatctaatattcttattttagaaagcgtaaaaagtgcctcaaaaccataacaacttcattaccagtaagaccctcccagtttcctttcatcttaatcttgactgcatctgcctgtggggccccagctttccaaggctttgtagcttctttcagaatgaaggctccttccgtggctggggtgagcagtcttgagatatccgcaagggagactccccagaaaaaaataacagggcctttaataacctcctgttggccgggtgcggtggctcacaccgataatgccagcactttgggaggccgaagcgggtctgaggcagagagttcaagaccagcctgacaaacatggagaaaacccgtctctactaaacaccaaaattagccgggcgtgatggtgcatgcctgtaatcccagctactggtggggctgaggtaggagaatcgcttgaacccagtaagccgagatcacgccattacattccagcctgggcaccacaagcgacactgtgtctaaaaaaaaaaaaaaaaaaaaaaaaataccctgttgcaggcttaatattagccttagcttggagtcactaggttcaagctttaatgtccacatcagttattcacttggtttttgaaactaagtgttagaaactccagtgaaattactcacaatgtttacataaaggaatttttaagatgcttactttttttttcttttttttgagccggagtctcgctttgtcacgcaggctggagcgcgatgattggatctcagctcactgcaacttccgcctcccgggttcaagcaattctcgtgcctcagcctcccaagtggctggtactacaggcacgtgccaacacgccgatagttttcgtatttttagtagagacgggtttcaccacgttggccaggctggtctagaactcctgaccacgtgatccacctgcctcggcctccgaagtgctgggattacaggcttgagccaccgcgcccagcaagaaaggggttttgaaccctaatgcagttcctgtttttgtttccatcccctattggctgggatcagaccgcacaatctaagctgatcctggtaagcttagacccaaactttttccaaataaagtaaatgcgcgatttgcgagaaaaggaaaagggggtagaagaagaggtagggttgatttacaacttttacaacttatgaccagaaagttgagtcatttaaaaggaacttagttgtcctaacacctctttacctcaagtgatccgcccgcctcggcctcccaaaacgttgggattacaggcgtgagccacagcgtccggccccatacatttttaataggagaaaagagaaactgtaaacccaaaggaacaaagctcttcccattcatgaacccgcaccccgagtcaggattctcccctgcccaccctcccctggtccctgcacaatctgggagagacgccacgctgcgggtgcagagctgcccagagagggctccaggccagggtagtcaccgcgcagtgaagagacaagacgcccgggtgccggctgtcagcgcagctgccattttatggctgaacaggactgaggccgagctgagcaaggagaactgggggagcagactgtggagctgactgcggggaggcctgagtcccgccacagccacttttcaccggttccaaccagtccctctcctctctcgggatgtcggaccctcactctcaccatttttggcttccaggaggtcccggtgtcttagctgtggatctcccaatacctgcaggacacggggccacacagcctgggcctttaggagaagaaccagacctggagctctgactgcagcgagagacaaaggccgcaccaaacccggaaaccgtcctcttcgctccagctgcgttcctgattggatggtttccagcccaccatccctgattggataatgcttaaggccccgccccctgaggccctgagtgacagtagatgtgatcagacgctgagctgagtgaagaaagagtgacagcctaagctgcagccttttcaggcagggcttccttcctgagctgagccaggcccaccccagagcatgggagaattctatcttttctttactctctctctttttgaatgtattcaaaaggtgaacagaagtattttgctctcatattaataatacataaaatttttgttcaagagaaaatcaacttttactttggcaataatgtattatcaatactaaaggtaattttgataaaaccttataaaaaatcaaatttgtcatttttgacctctcgagatttacatacatattttgtaatctaatgtaattttttaactttttatattttatttttatctacattctttttattttttcaatttgaaacaacctttaagtaatttcaaactgttacaagagacaaagaaatcatttagggccagtccgctggtgcacgcttgtaatccaagcactttgggaggccaaagtgggtggatcacttcaggtcaggagttcaagaccagcctggccaacatgttgaatctcatctctagtaaaaacacaaaaaattagccaggtgtggtggtacacacctgtagtcccaggtgctacggcggctgaagcaggggaatcgcttgaacccaggaggcggaggttgtgtaacggcctaagggcttcatcttgcctagacagagatgattcatcaagacaggggaatttgtggaggaaaagttaaatattaaatttgaactcagttgaacatggacacaaacaatggtcaccaagtcctggaacaggttatgtgagccccttgaggcattcacctgccgaccttcccctggtccctgcacaatctgggagagacgccatgctgcaggtgcagagctgcccaaagtgggctccaggccagggcacagtcacagcgcagtgaagaggcaggacttctgggggcctggctgtcagcgcagctgccatcttctggctgaatgggactgaggccaagctgggcaaagagaactgggcacagattgttttggagaaatctctattttaatctattcctatacgttagttattgaaaaacaatagccaatcgcaaaaaaaacaagttgacttttttgtgttccttgagcccagttgcaaagagcccagttgcaactgggcctcatgccaaacaacttgttacaaaaagagctaggatcccagactgcaccaaagctccaaagacctctccttgtctgtacagggatgggtggccgactctggagcccaggctgttgcttcctggtctgctgatgaatcctccatagtctggtgagtgtaaagatatatattttttctcttctccccttcccattgcaatgctcttattatatcaatttgcttattatatatgcattgccatttacctgggataaagcttgtttacccttaaaggtattgtgtgcgtgtcttttcttctcccctcatgtgtttcctgcacagaacatatttctcaaaggcttcatttgttcctttttattcatttttgtttaatcttgtctgcatgccttattttggcaaggtggtcttcaaactctgatgttctttcttctgcttggtcaatgcagctacaaatacttttgtatgcttcaggaggttctcatgctgtgtgttttagctccatcagatcatttatgttcctgtctaaaccagttattctagttagcagttcctctaaccttttatcaaggttcttagcttctttcaattggtttagaacatgttcctttagctcagcagagtttattacccatcttctgaagcctacttttgtcaattcatccatctcatcctctgtccagttctgcacccttgctgaagagacattttgataacttggaggaaaagccgcactctggcctttcagagttcttttgttgattctttctcatcttcatgaacttgtctagttttgatctttgaggctgttgacaactgaatggttgtttctgttttgttttgttttgttttgagacagagtctcactctgtcacccaggctggagggcagtggcacaatctcggctcaatgcaaccttcgcatcccaggttcaagtgattctcgtgtctcagattcccgagtagctgggattacaggcatgcaacacaacgcctggctaatttttgtattttttagtagagatggggttttgccatgttggccaggctagttttgaactcctgacctcaagtgatctgcctgtctcagcctcccaaagtactgagattactggtgtgagccaccatgcccggccttggatggggtttttgtcggtacttttttgttgttgatgttgttgttttctgtttgtttgtttttctttcagtggtcaggtccctcttctgtagggctgctgcagtttgctgggggttcacttcaggctctattcatctggttcactcctgttcctggagatgtcaatcaaggaggttggagaatagcaaagaagagtgtccgctccttcctctgggatctctgacctcaagaggcaccaacctgatgccagtaggatcgctcctgtatagggtgtctgacaacccctgttgaagggtctcacccagttgggtggcatggagaggagaacccatttaatgaagcactttgttccttggtggaggggagtgttttgctggggggaaacccactcatgtgggctgcccacatttttcagaactagcaggaggaaaggctaagtctgctggtccacagagactgcaactgtagcaggacgagccacagacaaaactcctcagacactgagttaaagaaggaagtggtttattcgaccgggagcatctggcaagactcctgtctcaagagccgagctccccgagtgagcaattcctgtcccttttaagggctcacaactctaagggggtccacgtgagagggttgtgatggattgagcaagcagggggtacgtgacaggtgctgcatgcaccggtggtcagagtgaaacagaacagaccgggaagtttcacaatgtcttttctatacaatatctggaatctatagataacataaccggttaggtcaggggttgatctttaactaccaggcttaggtcaggcaggctcaggcctggtttcaggtctggttccctggttttgtgtctggttttgtttcgcttttcttttcttttcttttctgagtacaaaacaatataaaacaatatgagagggtctgtctctcttctctcacagccaccccttcccctaggggctcaggtccagggacatcagaattctgtccctgagttcctgactggagctgttggagttcctgcagggaggcccagcccagtgtggagggatgagtcagggtcaggcctgaagagacactttggccgctgtctgccacagccagtgtgttgggctgtgggggacacctcttgagaccaagctgtccaacctccctggctctagcaggggaaaaatgcagccaggagctctagaaatggctgctgcccttcccgtgccgagggagcttagcctattaggcaactgggagtctcagtgctggctgctgtccctcctccaaggagctcaaaatgctgagactgcaggcagccacagccatggtgctggtcgcccctccctcgggacctcagcaggcttaagcagactctagctgagaggctgttaatccgttcaactccggggttggaatctgaggctccagtgccgtgggttcacgagcggaatcttctgatctgtggattgcacagtttcatggaaaaagcacggtttcctaggctgggtagcctgctcagtcaccgcctcccttggctgggagatggctgtggcaggactcaggcctgccgcactcagctccaaaatctgctcccggagtttttctcgcccagctcggcctctgttcccttcagccataacatgtttctcttccctgcgcagtgactgcgccctggcctggagccctctctgggcagctctgcacccgcagcgcggcgtctctcccagattgtgcagggaccagggcagggtaggcaggggagattcctgactgggctgcgggttcacgaatggaaagagctttggcccgtggggttcacagtttttcttttctcctattaaaaatgtatggggccaggtgctgtcgctcacgcctgtaatcccagcacttcgggaggccgaggcgggcggatcacttgtcaggagttgaagaccagcctagccaaaatggggaaaccccatcattattaaaaatacaaaaattagctggatgtgatggtgaatgcctgtagtcccagctactcgggggtcagaggagagagaatcgcttgaacccgggaggcagaggtggcagtgaggtgagatcgcgccactgcactccagtctgggcgacagagcaagactctgtcaaaaaaaaaaaaaaaaaaaaaggaagtcaccgcaaaaataacaagtaatttaaagagtgattcaagaattgtagagcacccagctacagtttgtagtttgtggtccatgggagaggcttgaagaaaagacatttataaggtgcatgatgaagaacactaaattcaataattggttagatatagttaggtagtttcttaatttgtacaatcaaggtggaaatttcctgattatgtaatcagagcttaattggcattttatagttgtttaagcttgaattgtgtttcccctaatgtagcgatttaccaaaaaatgcactcgagtttatatttttttcttagaagtagcaatccagggaatagagcctcttcagtctctcagactcctaaagtctaattgcctgccacttaattattttcacaccccacaggggactgattttctctggcatttttcacatgtgtcccaagtggggcctcaagtgtaccccatgttcctcaattaatcatttttaacactattaaataaatttgttttctgtttgtaaatatctcccctgagaagaaagaaaagaataatcccctgacactgtattgtaaaaatatttgtgcctctttttcttctatttttccagagaacttaccggaatgtttttaggtcaagattacccttcggaaactttatagggtgatgtgtcctcagctatccttcagttttttttctgggcctgggttttagtactttctggggataaaccaagatacccaccatggctatgtctgctggagtgtctagtgactattagctcttgggtcattttctcccataggaccacgtgaagtatggagtgtagcctctcaagggagcaggtggcagccctggggctgaaaggcatctcctggtgcacttttttttttttttttttttttttgaaaaactaactccttgagacatgaagattgtcttcaaccaacctagcttccatttcttggagacacattgctgggcagccaatcagatgctgatattgaggggaaaacagataatttctgccccctggattctcttgagtggggcagaaaaatagtgacaaaaaatagtgaaaaatttggaaaaaaaaaaaaaaaaactccaacagacaaaaaaaactgaccccagtgtgatggcataaaaacttatgaagtaaaatgtacctggggcactcactggggcatagcgcactatctcctgggagggtggttattgagcatgtaagtgaacaggatgggataggtaattggatgtgtaccttgaaaagatttgttcacttattttgacctcaggtatttatttatttatttatttatttatttatttatttatttatgagacagtctccctctgttgcacaggctgtaattcaatggctcgatctcagatcactgcaacctccacctcctgggttcaagtgattctcatgcctcggcctcccaagtagctaggtctataggtgtgcaacactgcgccttgctagtttttgtatttttagtagagatggaccaggctgatcccaaacttatggtcttaagtgatccacctgcctcggccacccaaagtgctgggattacaggcattagccactgtacccagctgcatcggttttttttactgtaatttgcattttattcatagggcttaaaaggtaagaaaatatttacaaaggacagaaaagagatgagtttcaaaaaattggtatttaataatatattccatttattaataattctcatttacctttttctttcccagagtaagcttaggaattttttcagatgtgttttttatggctgagttatttcaaacaaaattccaagccttagctttaagaatgctagctaccagctaagcgcggtgtctcatgcctgtaatcccagcactttgggaggatgaggcaagcatatcacgaggccggcagttcaagaccagcctgtccaagatggtgaaacaccatctctactaaaaatatgaaaattagccaggcatggtggtgggcgcctctaatcccagctaccctggagcttgaggcagataattgcttgaacctgggaggcaggggttgcagtgagccgagatcacgccactgcactccagcctgggtgacagagtgagactccatccccatctcaaaaaaaaaaaaaaaattagagcaaatctttctttcattttgactgtggacaatgaatatatttccacaggaaaatgtggtagataatttatggattacatagattcgtcaaaacaccagttcctctttttgcagggtaaatttgtgacagtgaatatcttagttctatatcatgttgccttgatttcttagtttaatgctaaattatatatgataaaacttatgtaccttctacaagtgtccccatatgactaattttttacaacactatttttaatagaaataataaaataatacatgtattttctgaaagaagtagacatatttgcttttcttatggagatacaaaatgcaggcaccttagccattttcagtggttcacacctgcaatcccagcactttgggaggccgaggcaggttgatcacttgaggtcagggtttcgagaccagcctgcccaacatggcgaaaccccgtctctactagaaatacaaaaattagccgggtgctgtggcacatgcctgtagtcccagctacttgggaggctaaggcaggagaatggctagaacctgggaggcagaggttgcagtgagctgagattgtgccattgcactccagcctgggtgacagagcgagactccatctcaaaaaaaaaaaaaaaaaagtaagcaccttaaaatttccttcccttatgtaaacacttagagtaatttcactggatttttcaagcagttagtttcaaaatcaagtgaataactctgacatggaaattaaagctttaacctagtggcttgaatctaaggctaatattaagcctgcaacagaaggttattagaggcagagttagatttttttttttttttttttttgagacagagtctcacactgtcgcctcggctggagtgcagtgccaggatctcggcttactgcaacctctgcctcctgggttcaagagattatcctgccccagccttttgagtagctgggattacatgtgcccgccaccatacctggctaattttttagtatttttagtagagacagggtttcactatgttggccaagctggtctcgaatgcctgaccacgtgatccacccgcctcagcctcccaaactgttgggattacaggcgtgagccactgcgtctggccaaaggcccagttacttttttctggaaagacttccctgcagatgtgtcagcctgctcaccccagccattgaaggagccgttgttctgagagaagctacagcgccctggaaagctggggtcgcacaggcagatgcagttgaggctaagatgaagggaaactgggagggtcttactgatcatgaagttgttattgttttgaggcactttccagattttgtaaaataaaaatgttagatttatgtaaaaaaaagaattccaaaaaattattgcaacaggagaaagcaataaccaactataagatctttatggcttgcaaaaatgtaggcataaaaggactttcttccctagggaggagcaaacaagtttagaaaggaggtgggagggaaatggcaaatggaggatgaaaaagtcagattttggatcagagaatgtcttaccctgaaatcagcatgttcttaggagggatgtaaaataaggttgtatgttgactcaggctgagggtagctcaaagttcaggagcctgagggagtgagataaccctaagtaaagtttgattaaaaaatattttattttaagctgggcacggtggttgacacctgtaatcccagcactttgggaggccgaggcaggcggatcacctgaggtcaggagtttgagaccagcctggccaacatggtgaaaccctgtgtctactaaaaatacaaaaatgagtcaggcatcctggtgggcacctgtaatcccagctactcgggagacttgaggcaggagaattgcttcaacctgggagaaggatgttgcagtgagccaagactgtgccactacactccagtctgagcgacagaacgagactccatctcaaaaaatatatatatatattgaccagtgaagacaaattcaattgatattcttaatgagaaaaaggagaaactgtgcagagtgtgtgtctggctgtgtgatatgtaagaaaaagtcataacaggaagagtgtttatttccataaactgttcttggagtacacaacagatggagaattttattaatcacaaatattttccaagattatctatgtgtttcatctttccccatctctttgttctacacatttcttccatttggcttttcctgggctgcctcttatatatgaaactggtaaacattattacagtgtttttctgagttctgtgagtagctttaccaaattattgaacttcagggaggttatgaaagtacccactttttaaacagtagctcagaagcataaatgggcccatggggtttgtgactggcatctgcagtaagaacaatgttgtgggactgaatcgctgtctgtgctgactttgggtagtgtcagaattcaaacgtttgacaatgagttggtgttggagaattgtttgatgttcagaaaactctacagatttggtgccagaaaaaagatatcatggaggcctggcctgtaataaaactctgggtatttgggaatgggaggctttgctctcctgtacacaggctgtcacactgcccattgtcttgtgattcctcccaaggtgacagaagactgaaaacttagaggaaagagctctgatgacagacccccttttcttgcagctaccaccacaggattcccacctactcccaaacacacacactagacgtgacatgtccacactcctcccaggactaggcaccatcctcagaaacttcaccatggcatttttgatcaaagtgtttcttgccaaaaagccacaagtgtctgcaagtctccttgcatatccccatccctgaacaatgaatctgcagcagcaacctgttttttccaccagcctagggttctggacctcctgttcataatctcatctgcctgcatgcacacagaaatgaatcagaatacagccccacctgggccactatctgtagcaaaaaattattcctttcacctacattacactctgtcccacccagggacattttttttcttttagcttttattttttgtttgaggtacacacgtgggtttgttaaacagctaaaattatgtcacaggggtttggtgtgcagattattttgtcactgaggtactaagcatagcaccaaacacgtatattttctgatcctctgagtcctcccaccctccgcccttaactaggctccagtgtcttgtttttctcctctttgtattcatgtgttcttattacttagctcttacttacaaatagtaacatgaatttggttttctgtttctgcagtagttttctttttttgttgttttttgttttgttttgtcttgagtaggagttttgctctttttgcccaggctggcgtgcaatggtatgatctcggttcaccgcaaccttcgttttctggattcaggctagtccattgcctcagcctcccaagtagctgggattacaggcgggcaacaccatgtgtggctaattttgtatttttagtagagatggggtttctccatgttgatcaggctggtctcaaactcccaacctcaggtgatccacccgccttggcctcccaaattgctgggattacaggtgtgagccacagtgcccggcctctgcattagttttctaagcataatggtctccagcttcatcaatgttattgcaaaggacatgatcattttttaaatggccacagagtattccatgatgcttatgtaccatattttgtttttactaaatcttttattttattttatttttggagacaggcttattgcccaggctagagtgctatggcatgatatttgcttacttcagtctcaacctcccaggctcaagcaattctgtagccctcatccttctaagtaactgggactacacgtgtgcgttaccacacctggccgatttttcattttgttttccgtggagacaggattttgccatgttgaccaggctggtctcaaacttctaaactcaggcaatccagctgcctcagcctcccaaagtgctgggattacaagcatgagccaccgcatctgaccataccatattttctttatcttgtctaccattgataggcatttagggcctgtccttgtctttgctattgtgaatagttctgcagtgaacatgcatgtggatgtgtcttgataatataataatttatatttctttggatatatacccaattatgaggttcctgggtcaattgataattctgtttttagttatgtgaggaatcaccacactgctttttatagttgttgaactaatttacactcccaccagcagagtataagcattcccttttctctgcaaatttgccagcatctgttactttttgacttttaaaaaatagccatcctgatgggtttgtagtgttctgaccagtgtgatgtggcatctcattgtggtttctcttttaatttctctaatgattagcgatgagcattttttttcatttgcttgttagccacatgtatgtcttcttttgaacagcatctgttcatattttttccctctttttaatgagattgtttggttttttcttgtaaacttgtttaagttcttaagaaattttgattattagacctttgtcaggcaaagtttgcaaatattttcttttattctctaggttgtctgtttactctgttgatagtttcttttgctgtgaagaagctctttagtttaaataggtcccatttgtcaatttttgcttttgtggcaattactttcggtagcttcatcatgaagtctttgccagtttctatatctagaatggtatttcccaggttatcttgcagggtttattataattttaagtttttcttttcagtctttatcttgagttgatttttttatatggtgtaatgaaggggtccagtttctgtcttctacatagtgctaggtagttattccagcatcatttattaaagagagaatttttcccacattcttcttgtcagtttcgtcaaaaatctgatgggtgtaggagggtgatattatttctgggctctctattctgttgcgttggtcttgggcactcatggattttttataacatctttctctcttctgctttttctcccataaacattctttcaagcgcatctagtgtgcaaaattcagatgttcaagagttcaaaaactctttaaaaagttccaaaaaatattttgctattccctcttttcttaagggaattagattatttgtagatgtttttctctgcttttttgaaatacaggtaaatcatattaacagctgaataaagcttttgtcagataatctgactccagattatctttctctagtacttcagatttattgctttgtttttgcttctcgaaaatttattttttttcatttttagtcctctaaagtagacacagatttgtttggataagagctaattttaagagcacacagaaacttaacacaaaaataggaataaatttagcaatacagaatgataaagactaaaagacactaagtatctttgacagaaacctgatgatccaaagcaattatgcagtatttgcaggctgaaggacttatactgcgaaagcaagaacagttcagtgtataaactaaacagtggagtctgtagttgtaccttgctttctattgattacttcagaacaattagcatagttatgtgtagtgtttgtagacaacctgcattcatatacattaaacagtactttctttcttttgagacagagtctcactgtgccacccaggctggggtgcagtggtgtgatctcatttcagtgcaaccactgcttcccaggttcaagcaattctcctgccttagcctcccaagtagctgggattacaggtgcaagccaccatgccaggctaagtttttgcatttttagtagagatggggtctcaccatgttagccagcttgatcttgaactcctgaccgcaggtgacccacccgcctcactcttccaaaatgttggaattacaggtgtgagacataaacagcattgtctacaatcgtatgaagataaagctgaaatacttactttgaatgaatcatttaaatggttattttagtatttttttatacttttgaaatataaagtgttttaactgaaatatatttgtaatttttaaaaatgctacatacattatgactagttcattaaaattattcatacttagatatcaaatatccaaagaaaattactatgaaattgttacagtaagtagatattcgtctgaaatgtttataactttattcaatagggataattataagtaaacacaatttaagtatcttttatttcactaaatttgtatgctactgttacagggcaaataaagacaggtgatatggcccctgagaaattgctagagtctgtggcacaggagggcacctgagaacaggaaaggagaaacttatatttttatcttcatggagcagctcatttttcctgaatctcttctgttttaaaggacagaaatgagtggacattttctgtctttgtttttcttccagttgatgttatgatagcaggtaaacatgtggtactgacatctttaaaggcatattctcaagatgcaggtgtaatttgtccagagaatctcaactgagaataaattccagagaaggaggagaaagaaaaaaagtggctttccttcaggtaaacatgtgtcagatgaagagctgtgtcaacttttcctcttggactgccatgcgtttaatactcacaaacctttacttctctacttgtgtttttcctccctaatgagtttggtttaactacttctttaaattcttatgatagtcaagggtttctgaaaaatatttctttcctatattccagagccttctctacattctcttcatcatagcttcttatatgccatgcagaattctcagcaagaatttatgatccacaatgtaggatacgtaaatttatcttcaaaggttttagcttgttaactttaaaatccaaaaggtgaagatcattaagtacaatgagttctgaggtcctcttcaaagaatcaatatgtcagtatgttctgctttcctgttgtttattctccattttaaagtttaacttcctcaatctttatgttccttgctcctagtttagtaaacaacccccttctaactcacatatttagagtttttagtcatccctcatcacctgctgtatcctgagtcaccccagtcacctgccttgtaactctcctttctgccaaaactactcaccatgccactctggcttgtacccttggtccctttaaaatagcctatcaaaattagcttaaactgtgtggtccaaccctacccaataggggaaacacacagaagtagggactagccgccttagggataagacccccttctcctcccttgtccaaaagtactctcaccattgttccatccacgagatgctgccttctatagaagtaaatttgccttgctgagacgttctctgtttgagtgcttgttttctgtttgactctgagcaattgtttccaacatgcaatatcaaaaatgttccctttgtggctgttgaacatggaaagaagtagatactcaagattcctattaggaaaaactgtggtccttagtaaagatggagaacatgtaatgttgaggctccatctgtgtgttccattagctctgtgcagaacaggattaagaaaatgcttatttaaatgagatggaatttattacccagaaagatctgaaaaaacttattaagagatacctgctctctagggtgctaaatgaagcctacttaaaattgctactaaaaattacagaacataggagtaatctgtactttgaagttgacataacacatgtttcttcatggttaaattcagattttatttacttttttgggaggaatatttcaacagtgatgctgtgttcttgtgcgtgtggtcttccttggtgagtataacttgaatacataattcataatataccctaaaggttttatttctctttttttctagaatattttttactaatttattctttgcatagaagagttttggatgcctttctccagaaaatgttcagaatttgttcatttagaaaacaatttcttcaagaatttttatcttaatccaaacttttgacattcctaagatgagttgtattcttaaccctgaattagtggtaattccagcagtttagtggcataaaatactgatacccccacctgaaaatctcattgccatcaccaatttttgattcagtagtaccaggtagtaaaatttaaaaacctacaaggagggtcaggtgcggtggctcattcctgtaatcccagcactttgggaggtttaggcatgtggattgcctaaggtcaggagttcgagactagcttgaccaacatggagaaactctgtctctactaaaaatacaaaattagccgggcatgatggtgcatgtccataattccagctactctggagggtgaggcagtagaatctcttgaacccaggaggcagaggttgcagtgagctgagatcacgccattaaactcctgcctgggcaacaagagtgaaattccatctcaaaaaaaaaacaaaaaacaaaaagaaacctacaagttgaaagtattttctatatatttagaagtttctgttataacttagtattttggtaataatttactagtgttgcaggaagtcagggaccccgaatggagggactggctgaagccatggcagaagaacataaattgtgaagatttcatggacattttttagttccccaaattaatacttttataatttcttatgcctgtctttactgcaatctctgaacataaattgtgaagatttcacggacacttatcacttccccagtcaatacccttgtgatttcctatgcctgtctttaatctcttaatcccatcatcttcataaactgaggaggatgtatgtcacctcaggaccctgtgttgattgcgttaactgcacaaattgtttgtggagcatgtgtgtttgaacaatatgaaatctgggcactttggaaaaaagaacaggataacagcaatgttcagggaacaagagagataaccttaaactctgaccgccagtgagccgggtggaacagagccatatttctcttctttcaaaagcaaatgggggaaatatcactgaattatttttctcagcaaggaacatccctgagaaagagaatgcatccctgagggtaggcctctaaaatggccatttcagggggcggccatcttttatggtcaagctgtagggatgaaataagctccagtctcccatagcgctcccaggcttattaggatgaggaaattcccaccaaataaatttttggtcagaccagttgtctgctctcaaaccctgtctcctgataagctgttatcaatgacaatgcatgcccaaaacttcattagcaattttaatttcaccctggtcctgtggtcctgtgatctcaccgtgcctccatttgccttgtgatatcttattaccttgtgaagcatgtgatctctgtgacccacaccctatttgtacactccctccccttttgaaaatcactaataaaaacttgctggttttatggctcaggggcctcccggaacctgctgacatgtgatgtctcccccagacaccaagctttaaaatttctctctttgtactctgtccctttatttctcagactggccaacacttagggaaaatagaaaagaacctacatgaaatattgggagtgaatttcacccaacatctggctgaatttcccctgataactggaatatatatgcatatatatatatatatatatatatattttttttttttttttttttttttttttttttttgagatggagtctcgctctgttgctcaggctggagtgccgtggtgcaatcttggctcactgcaagctctgcctcccgggttcacgccattctcctgcctcagcctcccaagtagctgggactacaggcacccgccaccatgcctggctaattttttgtatttttagtagagacggggtttcactgtgttagccaggatggtctcaatctcctgaccttgtgattcacccacttcggcctcccaaagtgctgggattacagtcgtgagcccctgcgcctagcctaatttactagaatattttatcacatcctctctgctgaacacattactagcttgtaattggagaatatgagcaagattcatgttatttatttttaataaaacatgtattggtgtctctgaaccagacctgatcacctgtctggagcaggaaaaaaaacctttgactatgaagagacatgagataattgccaaacccccaggtaggtgtgagtgaaaatgaatacaacagatgacacagattagagatcccaaggtcaaagagaaagccagtccttagaatgtgatttgggaagctgtgttccaaaggaaatagttcctgggcatctgttctattgtttgtttgtttgttttttaaattttattctcacaaaggggtatcttctgtcttgtgcttttaaattctctacaaattccacttttctttccgtgagcttccttcaagttcacagtgagagccaaagtccacttcagggcatataagagactgcacaatctggctgcttttctattgttttggggacacacaactatctgcatgattttgagaaactaaaagtttttaaagtttttttttgcatcagatttgaaatgtgtgggagtagttgtttctgttgaatatttttgttcatttttctgcccagcccattctgtttttattactatatagccttgaaatatagtttgaaattataagtatgatatttttctgctttgttcttttttctcaagattgctttggctattcaaagtttattttagtttcatgtaaattttagaattgtattttccgttactgtgaaaaaaataccactgcaattttgataggaaatttattgaatctatagatcactttggataatatggcactttaataatatttattctttcaatctgtagacacaaaatattttaaaatttatttagatcttctctaattttttcattgtttttttttattgtgaagatttttacctccttggttaattttttctcacaaatttattatttaatgctatagtaaataagatttgtttcatcttctattttatctggtagttgaagtttctgaaaccatatatatacttgcatgttaattttatattttgctaatttacgagtgtatttattagtttatgtagcttttaatgttctgtgatggtttttctaaaatataagattgtatgatctacaaacagcaactttttacttatttttctttcatttcaatggatttttttgtttctttgagtaattcttctgccacatacttccagttctacattaaaatagaagtattgacaatggacacaatatagttttgtattggtgtctgaatttgatggagcaaacacctcttcaagttttcatgaactgattttagaaggtaaggatctttctttgggcccttggggttatgagatgccctctgaatttgtagtgaagaggggttgtagcttggtcacaaggccgctgggtctgcactagggtccacctttagttggcttgttacaggggcttgggtagtcataattctcattttgttttggacacgctgcaaatttttcaggactttgctccatggggcagacactagggcatgtttttgcagttgggtctgcatatggtgggccttatatcaggacatggatgagtatggctttcactgagtaccagagagcatttcctcatgtaactgtttgggtttctatgtaggcaaaactggccatgaactgtggctcaggtactgaaactgagccattgaacgacttcagggaccacagcaaaggccaaggtctacaagtctgcctgcatggctgtaaatgggtatcttccttcaggtctctggaatggcaggacctctcccagactgtggctgggaggagtttgggatggttacagagttaagttcagaattctcagtgggatcaagttgggtgaaccctatcctggtctgtagccaaaaacaggggtcctgtagtttcccacctgaatgacatcctgccttcttaatagaacacttctcaatcttaagctttagtagtgtttcacaactccctcctgggatctcaaatctctcttcgagacacttattttggagatggcatcttgctgcttaacccaggctggtcttgaaatcctggcctgaagcagttctccaaccttaatgtaccatgtagctgtcattacaggtgtgagccataatgcctggtttctcataaaggcatttttgtcagggatggctgacttttttttttgctgtgaggggatatgaaaatagggcacttttaatctttttatcttactgatgtcactctccctacacatttttactttctattttctctttcagatttgcctgtaattttagattcagatatttaggacaatatgctagaatttgatggtattcctgaagtaaattagataattagtaagcactccatatttactcagttatttgtaaatttaagtttgccacaggcaaaaaggaattatagtattttcatctactttcttcagcttacatctacataataaaatagtttatttcctaatatttgtttcacatatcagagggtctcactttattctgcaaaatatatatgtgtatattttctatatttaacaatgtaaggctgttttttgcttctaaagttagattacagcagtttcattttgtgtaagaatagcatatatttaaaacataaaaaataacgttggtttattttaaatgcttatttattaaaagtttctcatcgtgttacccagactggtctcaggattttggccccaatggatcctcttatcttgatctcccaaagtgttaggattataggcaacagccactgcactcagtcagtatttttaaatttaataaaatttggtgtgtgtcctaacagcatacaccagatgcagataagaatattgtacattatcctggttttgactggaaagttttgtatgtgtctgtgaagcctagttggtctattacatggtttggatgttcatgttatccaaagctcatgctgcaatataaatcctcaatgttggatgaaggacgtggtgggacatgtttttgtatgggggcatatttctcatgaatggcttggtacatcctcttggtaaccaaaaagtttacactctattaattcaaatgagagctggttcattacatgaacctggctccttcacctcacacttgctcagtctcttatcatataatatgtccagttactgtttacattccaccatgacggtaagtttcctgagacccacaccaaaagcagatgctggcacacacttcttatacagtctgccaaactgtgagccaaataaactttttttctttgtaaattatgcactctcaagaatttctgtatatgcaaaataattagtacagtctataatgttgcccaggttttctgtttcttattttttatttgaattttctatttattattgcaaatggagtcttgatgtctacaattattatgttactatgtatgtcttgcttcacttttgtcaatatttgctttatttattttggagctctgatgttatatacacacattcatatagataaataaatattatagttaaagattcctggtaaatcagctcactttaccataatatattatcaatttttgtctcatggtagtacttgacttaaagcataatatgtctaatataattatgatcacttcactcacttgtggttactattttcatggaatatacatctttttcattcggttactttcagcctatttgactgaatgctaaaatgagtctcttgtaggcagcatactgtatgctttttagaaaaaccactcacactgggcatggtggttcacacctataatcccagcactttgggaggccaaggtgggtgggtcaactgaggtcagtagtttgagaccagcctgtccaacatggagaaaccccatgtctactacaaatacaaaaattagccaggtgtggtggcatgcacctgtgatcctagctactcaggaggcagaggtgggagaattgcttgaacccaggaggcagaggttgcagttagccaagatcgcaccattgcactccagcctgggcaacaagagcaaaattcagtctcaagaaaaaaaaaaaaaccactcaggcatcctatatcattttctttatattatttatttatttatttattttaagatggagtttctctcttgttgcccaggctggagtgcaatggtgcaatctcagctcactgcaatctccacctcccgggttcaagttattctcctgcctcagcctcccaagtagctgaaattacaggcacccacaaccacacccagctaatttttgtagtttttgttggggtgatcagatccaacaccaggttgtgggggctacgaagtctggcagagtcaaaggaatgggacaagacaagttaagagtacatagggtgggtccaggaggccaaagccagtttggaggctgtgaaggccctgagttctgggagtccacactatttattggtaatcaaacaatgaagcaggtgctgaggacgtgtggatatgagggtagacaggtgaggacgtgaggatagaaaggtagtggtgcatcaagtgtagctgtgacagtttagcatatgctgtgctacttaagataagggagaacaggttcttctaattcaagatccaatcatttatgatcttccgagagcaaggagcaaggggccagcgagtctggacacattccagaggttacaaggggttttatgccctgagccctgggttctctccaagccacaaggagttttatgctctgggcttagactgtagtgtggcagggcaggcttccaccatttggcacagagcttggttttccaaaggtcatgaggggttttagaccctggacccaggacatgttccaagactcttttacattatgtcagacaagcaagccctgcctcagctcttctgccaacagttttagtagagacggggttttaccatgatggctaggcttgtcttgaactcccgacttcaggtaatctgcccaccttggcctcccaaagtgctgggattacaggtgtgagccactgtgcccggcctcatttatttttgagatatgatctcagtctgtcaaccaggctgatttgcgtggttcactgctgcctgaacctcccaaactcagatgatcttctcattttagcctctcaagtagctgggttacaagtatgtgccatcacacacaggtagcttttttgtatttttagtagagactgagttttcccatgttgcccaggctggtcttgaactcctgggatcaagtgatcagcctaccttggtcttctaaagtcctaagattacattttattttattaagtagtttaattaatttatatttaaaatgattgcttaaagaaatgaagttgttattaccagttatatttatggttttatgtgtttccagtagttatatttttctcatttcctattttactttcttaatttttatttaattttgtactcacatgctttattttttattgtcttttgcatactttctataaatattttctttctaatcatctgaaaactggagattgcatgcatcttaaagttaaaacaatatgttttaatttcataaaaacttcaactgaatacaaaaactatgcctctatattttccagtttgttattgatatataaattattttatatggtgtatctattaacagatgcacgcagatttacacattgtttttatattctataaaagcactttaaaggttttatttaccatcatttttgttttttttggttgtttgttttgatttgtttttgagactgagtctcactctactgcccaggatggagtgcaatggtgcaatcttggctcactgcaacctctgcctcccaggttcaagggattctcctgcctcagcctcccaagtagctgaggttacaggtgcctgccatcaggccagcctggctaattttttgtatttgtagtatagatggggtttcaccatgttggccaggctggtcttgaactcctgacctcaggtgattagcccacctcagcctcttaaagtgctgaaattacagatgtgagccaccattcccagtgtggctgggatttaccatcattttgatagtaaagaattctatatgtgtccatatatttacatttattggagagctttatatttacatatgtttttatgatgctgtccagcaccattttatgtttctacataacggacacattttaacatttctctgtttttatatgtagggtctcattatgttgctcaggctggtcttgaacttctggtctcaagtgatgtgattgctttggcctcccaaagctgtagaattacaggcatgaagcactgtgcctgagccccgtgcagtattttttttttacttttttttttttgagaccgagtctccctctgtcacccaggcctggggtgcagtggcatgatcttggctcactgcaacctccgcctcccaggtgcaagcaaatctcctgcctcagattccatcccgagtagctggggttacaggtgcatgccaccatgctgggctaatttttattattattattatttttagtagacatggggtttcaacatgttggccaggcttatctcgaacttctgacctttgatgatccaactgccttggcctcccaaagtgctgggattacaggcttgagccatctcacctggcactttttttttttttttttgagatggagtcttgctctgtcgcccaggctggagtgcaatggcatgattttggctcactgcaacttccgcctcttgggttcaagtgattctcctgcctcagcctcctgagtagctgggactacaggtgtgcaccaccacgcccagctaatttttgcatgtttagtagggacgcagtttcaccgtattgttcaggctggtcttgaactcccgatctcaggcaattcacccacctcggcctctgaaactgctgggattacaggcgtgagccagtgtgcccagccccatgtagtatattttgtagaactgttagtggtgatgaacagtctcaccttttattttggaaagtctttatttttgtcttcttattgaagtagtgtaattttgaattgagttttactggttagaaatttttttttgttacattaaaatttgggaagttctcagcttttttttttttttaatcttcaagtaatgtctgtattactttttctctatattctaagattcctttcatgaatacattgatctgcttgatggtatccaataagttttacattccatgtgttaattttgttttgtgattttatattattgtgttatatatttttgggtatgccacatcacagcagttagttgtgttttgattttttagtttatattataattgtatatgacaatatttaactctgtacaatttaagacagtgtggagcaaaattaaatgtgaataagctgtatgtctattaccagtataattatttctatgtttgttggcctgtataaattttatcctggtatttttgtgtcacttgtatatttgttgtgtgtttcttgtagtaggttttttggagttttttgttgttgtttgtttgtttgagagagagttttgctcttgttgcccaggctggaatataatggtgggatcttagctcactgcaacctctgcctcctgggttctagcaattctcctgcctcagcttcccaagtagctgggattacaggcatgcaccaccatgccaggctaattttgtatttttagtagagatggggcttaaacattggtcaggctggtctcgaacacccgacctcaggtgatccacccacctcagcctccctaagtgctgggattacaggcatgagctactgcaccaagcctataacagttttttaatcctgtctagatgagtagtcataaaaaatctcctaatttcaacatctatttatttgtgaatctacattgttttgtgtgaaagaaacacttttggatttgaagataatttaaaaactataataactctgtatctctcttaggtattatttttacttatgtattttgtgtcaaaaacataacaaaatttacaataaaatatttctaggccgggtgcagtggctcactgagtgatattccagtatttttgtacctactgaatgatttggtgacagaaatttgcattgcttttacctattggctttcagtcacaatgctgcaatagttatgtgaaagttaatatatgtactgcattctgttttatttttctaatttttcacctttatactcataccaattgttttaattctgtagctttttgatgtgttttgaaatcagaaatggtaaagcctccaacgttgttcctttttttgaagattgttgggtactttcttgtctctttagattccatatacttttggatttgttgtttttatttcttcaaaaatgcaatgagacatttgaaaaacattgagttaaatctgtagattaaattgagcagtacagacatcttcacagtattaattctttcttttttggttgtttgtttttgagatggagttaaattcacccacctcggcctcccaaagtgctgggattacaggcatgagccaccgcacccagcccagtaatttcaacaagtgcatgctcaagagtgtgtcatatgatttctatatatttgtaaatttatcaaatatttatattattgttttatattctaatttcattttttgtcatagaaagtaatctataaaatctacattttagaaaatgtgttgaggctgggcgcggtggctcatacctgtactccctgcacttgggaggccaacgcaggcagatcacctgaggtaaggagttcaagaccagcctgaccaacatggagaaaccgtgcctctactaaaaatacaaaattagctgggcgtggtggtgcatgcctgtaatcccagctactcaggagcctcaggcaggagaatcacttgaacctgggaggcagaggttgcagtgagctgagactgcaccattgcactccatactgggtaacaagagtgaaacactccatctcaaatatatatatatatgtgttaagattttgtttttggactaacaggtggtctatataggagaatgttgtttgagctattgagaaggctgtgtattttgatgctgttgaggagtgttctctataccttcattagaaataagtgttttttactgccttctagtcctctgttccattattaatattatgtcttgttttattattattacagaaagtggggtattgaaatatcctactataattatattgctctctctgtgtttatccaattttgttagtgtttgctttatatatttgaaaccctagtttgagacacacacacacaaatacacacatggataaataaatttgtcataggttctcagtgaatgaatctatatattatttaatgtcctttgtctttctgaagtttgaacttaaagtacattctataaaatatgacagtttttgacttaacatgtatcttgtataatattattttgacctcttctactctcatttggttaatatttacgtgacatttctacttccattatttcactttcagtcttttttgtcattagatttcaactgagtcctgtagaaaggcaagttgaacattgattttaaacactttttaataaacctgtttattgaaagtatgtctcttgattggaaagataattatatatatatttaaatggttttctgaaagagaaaaacttactaatgttatattattaatcattttatttgattctatctttttctctcattttctctttctgtctttttttgtgtttttttatttctgtattgatatgctttcagtttttttcttactttcttttgtgtatctatataaatattttcttagataccttgggggattacataaaacctctgaaagatccaacaatatatttgaatatggtaaaaaactaacttcaattgcatacaaaaattcttcatcattacgtctgccttcaactttgttattgattttgctaattttatttttttatgttttatgttcattaacagatgtttataatcatgtctatacttttaccttttaaattttagagaataattaaaaatgttttctgtatcattatgataatgttaagtaataaatttcatttttgtgtatgtgcatattgcattatgttattttcagtgaaagaacctcctttcagcatctttgatatgtagagcatatgcaatgtcaatatactttctcaggatttggttattttggaaggacgtctttgtatttggtagtacaattttgctgatggtattattcccacttgacagctttttaaaaattattataactttaacaatatcacacagtttccttctgacttgcaaatttttttttgataaattcactggttatctcatgagactatgcttataaatgaaacatttttatattgtagtgcccaaaattcttttctcatatgccattttgaaattttgcttatatttgtgtctgttattatctttgtgtgtacctaaatttgttttttcagctttttcatgtttacgtcatattttcttttaagaaatttttcagttttttggtaattttatatccacaatttttggtattttaatttttttatctttatttttctgatcttcggtagttgtctgtgtttctatttttttctgatacggagtctttttctgtcgctgaggctggagtgcagtggcgtgatgtcggctaactgcaaactctgcctcccaggttcaagcgattctcctgcctcagcctcccgagtagctgggattacagctgcctgccatcacgcccaacgaattttttgtatttttagtagagacggggtttctccatgttggccaggctgatcttgaactcctgacctcaaatgatccacccactttggcctcctgaagtgctgggattacaggcacgagccacaaagcccagcctttttcattgtatttttgagacagtgttgctcaggctgcagtacagtggtacaatctccactcactgcaacattcccctcccaggttcaagcagttctcctgtgtcagcctcccaagtagctgtgattacaggcaaatgccaccatgcccagctaatctttgtatttttagtagatacagggtttcatcatgttggccagggtggtgtcaaactcctgacttcatgtgattttcccaccttgatctcccagtgtgttgggattccagaaatgagccactaaccctggcctgttcaatctattttgaatttttaaaattactttctatactttctatggttgctttagaaaattttatgtttttgatggggccatattgttctaatatttggtatacattataatctttgattgagatttggacattaacaaaaagctacctgttacaatctttataatatagctttgtgtttgcgtagtctgaagtcaattgtcttggctaaagattctgggaattcctcaaacatgtttttaggatgtatcttgtctaaaattttgtttttattgtttagataaatcagcttgttcacatttcttcttaataatctgtaatcacttgccacacccattccctgtttggggtactgcagtttctctgcttctctgtaatataccttcagactcagcagactcaaactgtcattccaacatgtatcaccatttctttcagcattttatgtcacgagaaacattaactaatgtctaagaaagcccctagaagccagaaataaagatatatgtgccaatatttttctagtttttttttgttttgtttttaaaaacgaggggttggcaatttacatgtgtgtgtatgtgtgagacagagtctcactctgttacctaggctggagtgcagtggcatgatcttggctcactacaatctctgccaccacagttcaagcaattctcctgcctcagcctcccaagtagctaggattacacatatctgttaccaagcctggctaattttttgtatttttagtagagatgggatttcaccatgttagtcaggctggtctcaacctcctgatctcagataatcctcccgccttgccctcccaaagttctgagattacaggcttgagccatcatgcctggtcagcaatttactttttttttggaggggcaggggatgaagtctctctcttttgcccaggctgaagtgcagtggcacgatctctgctcactgcaacctccgccttccaggttcaagcaattctcatgcctcagcttcccgagtagctgtgattgcaggcacccaccaccatgcctggctaattttttgtatttttagtagagatggggtttcaccatctcagccgggctggtcttgaactcctgacctcaagtcatccacccacatcagcctcccaaagtgctgggattacaggtataagccaccacatccatttggcaatttacttttgaagacacaatcttatatggagagcaggaagagctgtgttgggtataagtaacagacctctttttcttctatgtggctctttgcattgtgctcacttggggcccttcacacacttaactcatttatacattttttacaaacgttttttggtcagtatgtttttgttacatttatatgtccaggaagaaattacagcttatggtattttgctatgtcatcttgcttatgtagtttgtataattttataggttagatttgtaaagtatatttatctgagtctagcaactgaagtaatgtatttgtattgtttctttcagttatgtgttctcattttgcccaagacctttggccagagcagagcgtaaaagattctttccaaaaactgatactgagaagttagttatgaaaaatgtggacatgacaatttacagttaaaaaaagaatgtgaaagtgtggatgagtgtaaggtgcacaaagaaggttataatggacttaaccaatgcttcacaaataccaagaaaaaaatatttcaatgtgataaatataggaaagtttttcataaattttcaaattcaaactgacataagagaagacatacgggaaaaaagacctttcaaatgtatagaatgtggcaaagcttttaacaagttttcaacccttactacacataagaaaattcatactagagagaaaccctacaaatgtgaagaatgtggcaaagccttcaactggtcctcataccttactatacataagagaattcatactggagagaaactctacaaatgtgaagaatgtggcaaagccttcaactggtcctcataccttactgcatataagataactcatactagagagaaaccctacaaatgtgaagaatgtggcaaagcctttaagtactcctcgaacctcactacacataagataattcatactggagagcatctctacaagtgtgaagaatgtggcaaagcgtttaaccatgctgcatgcttctttgtcattttgaagatttgacttaaagtacattttataaaatatgacagtttttgacttaagatgtagcttgtgtaatattattctgagctcttctgctctcatttggttaatatttacatgaaatttctacttccatctttccactttcagtctttttttctcattagatctcaactaactcttgtagaaaggcaagttgaatcttgatttaaaaattttttaataaacctttatattgaaagtatgtctgttgattggaaagataattatatatatattaaaatggttttttgagagagaaaaacttactaatgttattttattaattgtgttatttgatttttgtatctttgtctctcattttctctttcttttttgtgtttttttatttttatttttatattgacatgctgtagggagaccccctgaaactatggctatggaatgaaagatgaaatgctcctgatagttgtaaatacaaaattacatgcaggattgtgtaaagacaatgccaggttgggctgccagaatgagccaacagtgcgtgatgtgcttcgccctgcagagagcctataaacggatgtgcagtcaggaaggtttcacatcaccaagattcctatcccagaaaagcagatattcatagctctgggaatggaatgcgacccttgtggagagcctacaaatggatgcatgaggggtgcctgttcatatggataacatcgggctataaacgcccttatcttgccatggctcttctaggtctctttagggttaagacatactcccttctgagaatttgtggtctaatcggttgtctagttttacatcctccttttattgattgtttgcaaccagcttttgctgtaattattactactgattaatatcttgctcatcattaatcatagattatggagagacggggtttccgttttaaggctctgttaaaaattgctgatgcacacactatattgtaaattcttatctctgtatactgtacttctgcatattgatgttatgttaaagaattacttcattcccatgtgaccatctcacctcataatcaaacgactctaaatccctcattaacctacccccaccctcactaaacttaataataaatgctggtatatccagtgcattggcagcatggcaggaccagaaggcggtgaccctcctggactcaactttcactatcttgtgtgtgtcttttatttcttgacctgccgatccacctgggaacaaagaaagagccccattgcattgcgggctgctggccagatcccgcaataacatgctttctgtttttgtcttatttcttttttatgtatctatacagatattttctaagtggtactttcaaggattacataaaacctctaaaagatccaacaatatatttgtttgtgataaagaatcagcttcagttgcatacaaaaattcttcatcattacatcagccttcaactttgttatgattttgctaattatattttttatgttgtatattcattaacagatgtttatagtaattcctatacttttatcttttaaattttagaaaataactaacaatgttttctgcaccattatgataatgttaagtaagaacttttatttttgtgtatgtacatattttttccagaaatttatgtattttcatatgattaagtgttgttttcttgcattatattattttcagtggaagaaactcctttcagcatctttgatatgtaggacatatgcagtgccaatatactttctcaggatttggttactttggaaggacttctttttatttgagagtacaattttcctgatattctcattcccacttgacagtttttttttaattataactttaacaatatcacatagcttccttctgacctgcaaattttttaataaattcactgattatctcatgaaaccatgcttataaataacacatcatttttatcttgcacctcccaaaattctcttcttcttatctgtgatttttgaaattttatttatatgtgtatttgttatgaatatctttggtgtatcctagtttgtttagcttcttcatctttatatcatgttttaagaaattttcagttatttttttgtattatttatattcacgattttttttgctttttttttttttttttgatgcagagttttgctcctgttgcccaggctggaatgcaatggcatgatctcggctcactgcaacctccgcctcctgggttcaagcaattcccctgcctcagcttcccgagtagctgggattacaggtgcccaccaccacatccagctggtttttgtatttttagtagagacagggtttcaccacattggccaggctgatcttgaactccagacctcaggtaatccacctgccttgggctcccaaagtgctgggattacaggcgtgagccaccgtgcctggccttttttttcctttttaatatttcttgttgttatcctcatttttctaatcttcagaagttgtctgtgttcctatttcacttactgaatattattcaatatatttgatttgatttgatttgatttgatttgatttatttattattctttttgttttctgagacggagtctctttctgttgcccaggctggagtgcagtggcacaattttggctcactgcaacctccgcctcctgggttcaagcaactctctccctcagtctctcgagtagctgggactacaagcacccaataccatgaccggctaattttttgtatttttagcagagatggggtttcactatcttggctggtcttgaactcctgacctcatgatccaccgatgtcagcctatcaaagagctgggattactggcatgagccaccaagtccagccagctttttacttttaaaagcacaatgttatactggagagcaggaggacctgtgttgggtataagtaacagactttactttttcttctatgtggctgtttgcattgtgctcacctggggccgttcatacacgtaacttatttataaatttgttacaaatgtattttggtcagtatgtttttgttaaatttatatgtccaggaagaaattacagcttgtggtattttcctatgtcatcttgcttatgtagtttgtataattttataggttagatttgtaaagtatatttatctgagtctagcaattgaagtaatgtgtttttattgtttcttttggttatgtggtctcattttgcccaagacctttggccagagcagagaataaaagaatctttccaaaaagtgatactgagaagatatgaaaaaaatggacatgacaatttacagtaaaaaaaaaggctgtgaaaatatggatgagtgtgaggtgcacaaaagaggttgtaacggacttaaccaatgtttcacaaatacccagagcaaaatatttcaatgtgataaatatatgaaagtctttcataaattttcaaattcaaacagacataaaagaagacatactggaaaaaacctttcaaatgtatagaatgtggcaaagcttttaaccagtcctcaacccttactacatataagaaaatttatactagagagaaacctacaaatgtgaagaatgtggcaaagcgttcaactggtcctcacaccttactacacataagataattcatactggagagaaactctgcaaatgtgaagaatgtgccaaaacctttaagcagtcctctaaccttactacacataagataattcatactaaggggaaaccctacaaatgtgaagaatgttgcaaagcctacaattggtcctcaccccttactacacctaagataatttatactaaggagcaaccctacaaatatgaagaatgtgacaaagtctttaagaactcctctcaacttaccacacataagataattcataaaggagagaaaccctacaaatgtgaagaatgtggcaaagcctttatgtactcctctacccttactacagataagatacttcatactggagagaaaccctacagatgtagagaatgtggcaaagcttttaaccatcccacaacacttttttcacataggaaaattcacactggagagaaatcacacaagtgtgataaatgtggcaaagcctttatttaatcaccaacccttagtaaacatgagataattcatacaggagagaaaccctacaaatgtgaagaatgtggcaaagccttcagctggtcctcacaccttactacacataagagaatttctactgcagagaaaccgtacaaatgtgaagaatgtggcaaagctttcagctggtcctcacaccttactacacataagagaatttctactgcagagaaaccgtacaaatgtgaagaatgtggcaaagcttttaactgatcctcagacattaataaacatatgataattcatattggacagaaaccaagaatgtgacaaagctttttaaggaagttctcaaccctcattacacataatttatactggacagaaacctacaagtgtgaaaaatgtggcaaagcctataacaagttctcatttttatttttttttgagacagagtttcagtcttgtcacccaggctggagtgcaatggcacaatctcggctcactgcaacctccgcctcctgggttcaagccattctcctgcctcagcctcccaagtaagtgggattacaggtgcccaccaccacacccagctaatttttgtatttttagtagagatggagtttcaccatatttcccaagctggtctcaaactcctgacctcaggtgatccacccgcctaagcctcctaaagtgctgggactgcaggcatgagccaccatgcccagccacaagttctcaattcttaagagacatggtgataattcatgctgaagaggagctctacaaacctgaaagatgtgaaagtgcttttagcaacccctccaacttttctatacataaaaaaaattatactggtatgaaactctagaaatacataaaatgtgaaaaagcctttatatggttgccacgcttgattgtacataagataattcatactgccaaaactcctacaagtgtgaagaatgtggcaaaacttttcatcagtgcttacaccttatttcatagtaaagctagtatctttgagaaaaatcgtacaaatataaagaatatggaaaaaccattaatgcctactcacatcttactcaacataagaagattcataattaataaaagcattaaaagtacaattactgtcaaaaaatctttcagaaaatataaacctttaaagtgaaaaaaaatttattctgaagacaaccattacaaatataaaggaggttgtggtacctttacttgtatcacagatcttattgcaatcattttgtactagaggataatccctaagcagttgctcaagctttgttcaacatcagggattttatattggagaaaagtcctgcaaatgtaatgaatttggagagacatttttttttttacaaaaactacagcttgtaaaacaccagagagtttatactaaagtatatttttgccgttgcagtaaataagaaaaaatgcttaattcaaaattgattctatgtaaatatcagagaatttacactagaataactaaggcactgacacttcagacattacacttagagtgttgagtataaaaactaatccacgactaaagttgttagataaattatttgtatgtaactataaaaggagtagattttttgaagcattgtaattacattgaaagtatacttgtttccttgaaaaaaattttttgaaaagtgaataatgatgtaatacagctttcaaattactttgtgctgttattttattcctatcgtattcacgtgtgaaagcatgtgatcaattgttgctgcatcgagatattagagattcttttttattaattgggcatatttatgaccttttctataaaagagtaaggacattaaaatgaaagatgcctgatgaaaatataagtggagaggttctttgtagttaacctatattaagtaatgcatatggtagatgttcagagtaatacttttctatattatagtgagagaaattattaattatagttaaaagtatattaaaataaattagtaattttactggttgtacttttatgtaataaaatgcagtacatttaaaaattgttagattatgtgtgaacttattttttttaccatgttaagactactgtgcattgaatgaagcattattatgcaactaaatttagcctatcccacattacttaagggtgtaggtaaaagatggtagcaatatactatttggtgcatagtggaataacatctctagtaatcactttgccagtggctttaaactgcaaatgagttgaagaatactgttcttataggttaaatttttactcttttttcttactgaaatttattattagtatttgtgtgtatacagtatgtgtatatatttatgccttatatggcatatttgtattcaagcatacaatacgtagtaattacactagggtaaatagagcatccatcatctctagcatttattctttctattacaaacagtgtaattatacactttattatttattgtaaaatgtacaattaaattcttatggactacagggttatttttatggttataataaaaattatacagaaatataaatagaatacagccaggagcaggggttcatgcctgtaatcccagaacattaagaggccaagacaggtggattgcctaaggtcaggatttcaagaccaggctggccatcatggtgaaaacccatctctattaaaaatataaaaatataaaaattagcagcgcatgcctggaggttgaggcaggagaatcgcttgaacccaggagatggaggttgcaatgagctgagattgcaccactgcactccagcctcagtgacagaagagactccatctcaaaaaataaataaataaaataaacagaaatagaaataaaattcatacatttctgagtcctgaaaaattattaataaatatttgttatatagttttctttgaacatgtggtctctctgcatgcaatcatatagacttttaatttacatagagttaagtatacacatattactctgaagataaaccttagatgtaagaaaattataaagtgagtgtgtttgtgtatgagtttgtacatatttttagaagaaaagtgcaattattggaacaaaacaaattaattaggtgactaatagaaaactaaacaccatgaaaatgctgaaagcaaatctatactttctgctttgtcttgaatttattaatgtaaaattttatgacttatggttcggattctccccagaatctgcctattaaagcacaggcaactttctctccagagataacactcttgagtacaacaataaaagccctcttcaaacagaaaacaattatttctaacatttattttaatgtaaatttcactaaaattgactaagtggatagatttttattgttctatgtgtgtgtgaatgtataaaatagtacataaaggaaaaataagccagaaagaagatgttagttaatatttgtgatgaataaaactggaaaggagttaattattatttgcagatgacagctttgtttatgtagataacaaaaacagcagaaagaatattttaaaagcttattcagttgggtaggcaacattctaagataataccctggattcccagtctgttgcacacctgctgtgtaatactttcctcttgagtgtaaaaagatgtgtgactgtggtgggaaattactcatgaaattaggttactcatgtgttgactttgtgttatcaaaatggagattatcctgattgtgctaatcttaatcataggtgcttttaagggaaagagacacatcacagaaaatcacccctgctggctttaaagtcagtgacttctaggtgggccatgttgtaagctgcttatggtggtcacatggcaggaaacatgtttgtatattgtcatcattcctgcctcctggatgttgcttccagtagggagaataagaggatcctatggcagagggggaagaaaagggaaattcattcatgcaagaaataatcacctctcatctgggatagcttaagagaaagaggagaccacaacaggaccaaattaatgggaggaaaaaggtaacctgggtaaaagtgctctctggcattatggaactacatttagtaagctgtagtgaatgatcagcctctgggataccaatagtctaccaacaaggctgaactcattctaattcaatcagcatgtctgcaccattctggtgacccaggtttacagtattcattacagaaataccatgaagaccagtgggtaatgtcctagaattgaacttatttcaaaaagcattcctaattatttgttttcacttttgaaaaaccttaaaaacaatacatttataaataattaacttctaattatagaggattctactatactgtaatataatattaaactgtaaacaccttaacatgaatattgaatgcatgattagttatgtagatggtttgttttagattaacatgacaaaagtaacaattagagaaaacatttgacatgggataaaattaatcaaaaccacatcttttcaatggcttggcataatttccatgcttttggaaatggccagataattagcaagaaacaaagacaagattttggctttgctcaatgatggtttttgaccttttgaaatctaaaatccttgctaaagtattcaaagggagtattttattggtggctgcccagggtttccaaggcaatgaaggaagaattttgataggcaggaaaatgcacactatatacacacattgctcttctctgatttgctttaacactgaaaaattgaagttgtaaatgtagtctcaatttagagtaaattaacaaatgacttgtttttcaaaaaagccaatgtataaaattaatgggtaacagaagccattagctgctaaaaactagtatgactaaattcagtaagtatctagccatgcaaataacagtccaattaaatgaagaccctcataggtgcatatggaaagcattgctgtgcagtgtggtgcctccactcagcattttcttctgcctcttcacagagaaaccagtttcccctgagtgactcagggtgcatactgggaactgagaatgctgtgttcagagtgattactgaaaacatggttaacacacttcttccatatgataataaaatgttataaatcttactctgcctcagaaaagcttttagtaaatgattatagtactcaatttgggtttatggagaatttcaatgttccagataattcagacacttaaatgtcaatgaaatcccataaaacatatttgaataagataaagtcttcttagctaacaaatttgtattactagtacatttataaaaaaatagaaaaccagtactttaagccaaataacagtatttgacacgttagtagcacccaaacaagtgctcttcacgatcattgttaaagcagcaatagcaccacgtgctttcctgggacctgctggcctgttttccactgatataaagtggagaaggcattgaaatagcaaaggagggtgatataaattgaatacttatatgaaatacaattttaaataaaacatagcacttgatgttgtacaactataggcgagactattagtgtgaggtcatatttttacttatattgacaaaataatcattcacaatattcttatttagaataatattcctgttctgctgtatatttgctagcttttgatcaaatatttgggagctcaatagaaatcaacaaaatgaatctttattttaccacaagcattattgatgcatatgcttgtttttattaaaatccattaatgttttatgaaagattatacttttgctgggtgcggtggctcacacttgtaatcccagcactttgtgatgtaaaatcacacccttgtcttttttgtctttgtggctgaagtcgggtatttatggtaatgcaaaagaagtctaggtctctttttagaagaaagatggtgatgatggaagcaaatataatggtgcatggtacttggccacatttcaaatgggtgataatgaacattcacctaagtgccacaggtggcttttatttaccacatcaaatcttctttgtgaggaaggctcagcccactaatgtcaagcatttttggtggttcctagatagatgaacaaaacctcactgggctgttttaatgagaccagaattaaaaacacccaggtgccaggttattaagaacatttttacacttgtggaaaaaaatgtgatgtggcgtgtggcttggtttgaataaatcttcactgaggtaagtagctgattgaatttacctaactgtaggttaagaaatgaaaataacctctgaccaagtttattttacaggcttatttctgtacatataaaatagatggctagataaacatatacacataaaatgagtcacatggatatgtctacgtaatgtttatttgtgcatagatctcacaaacaaaaaggctcagaaataaagcagatcagatgacatctccgtattctacccctgaagccgaggtaaattaaataagcaaattagcagaacccaggtggttgtaatcagccaatttgcacagcccaggtgattccaaccagcaaattagctcagatgaggtggatccaatcatccaattatctaaatagagactgtggctttatcaaggcaggccccaaatggtggatgtgaacagaacatgcacacactgaggagacatgcagggcactgaaatactaacctggacagataagttacatggttttattttcagcttatttctgtagacttgcccttgaagttaaagctttgttgatatttacataaacaacattgtatggctacgttccattctgacatgttacttagcaaaagaaaaaagaagtaattctacatcagcatgtttagtgcatgccagaagattaaaaatgtcttttggggaatgtattttgtatacataagtatttacatataaatatttatataattatgtgtttgtcttcctatgtatatttatatctagatatgtcaatcttcgtattgatatgcattgctacaaatagtaagataaagagtaacttccagccgggtgcggtggctcgtgcctgtaattccagcacactgggaggccaaggtgggtggatcacctcagctcacgagttcgagaccaacctggccaacatggtgaaaccctgtctctattaaaaatacaaaaattagccgggcggggtggtgagtgcctgtaatctcagctacttgggaggctgaggtcagagaatcatttgaatcttggaggcagaggttgcattgatccacgattgtgccactgcactccagcctggcagacagagcaagactctgaaaaacaaaaacaaaacaaaaacaaaagtaacttccatatatgtataagtttatctgccctataaacaatatcacaaatattacacaaataaaaatatgctctaacatacatcgtgcctcatttaacatatatgaaagcagcagctttttttttgtttgtttcttgcttctgggagataaaaatgcactaaggtgatggaagtcattcattgccatatcaatgtttacccttctctttctgttgcacacagggcaaaagctgaaccagcctcagtctaaagtttctcaccaaaatttgagaatgtttattctttttcattaagactttcatcaagacaggggctcttgtttatttccatgagtgtgcaatgtgaaagtacactgttgtccttttgcctttgtggctaaaatagggactttatggtaatggacagaaagcctaggtttcttttttttttctttgtttttttttttttttgagatggagttttgcttatgttgcccaggctgcagtgcaatggcgcgatttcagctcactgcaacctccgcctcccaggttcaagtgattctcctgcctcagcctcccaagtagctgggattgcaggcgtgcaccatcacacccggatacttttgtatttttagtagagacggggtttcaccatggtggtcaggctgatctctaactctcgaactcaggtgatctgcctgcttcagcctctcaaagtgctgggattacaggcatgagccaccatgccccaccaaaagcctaggtttcttattagtagactgtcatactgaaagcaaatataatggtacgttacttggctgcatttcaaacaagtgatagtgacactacactgaagcaccaaaggtggttcttattggtcaggccagagctccttgtgaaaaaggttagggccactggcatgtctgaaggttcctagctggatggacagaaccccatgggctattttgaatagacactgaatttaaaacaccttggtggccagtaatgaggatattttcacatttagcaaaacgtgatttgatgtgtggcttggagttgataaatcttcactgaggtaatggctgattggatttacccggcctgaatggaaaataaaataaaaatcacctctgacctattcttctttgtggtcttttttatgcacacagatatatatatatatagatagatataagataggtggctagataaacatatacacagaaaatgggtaacacaggtatgtcagtgtaatttccattattgcatatgtcctgcagagaagcctgagaataagtaggtcagacgccatttttcttcccaacttcttcacaccacgtgaatttaatgagccacttagatcagcgtagatggatataagtcaattagctaaattgggaaagtgaaggcatccaggcaggacccaaatggcaaatatgaatcacattggcatacggtgagaaaggaagcagggccctgaaatgctaagctggaactagagtcttatatggctttaccaaaaacatacttcccgggtcatgcacctaaaagtgaaggtttgttcatgtttaaacataacattgtatggctgtggtccaatctgagatggtatggatccgtataggtgagagtaagtttatatctgcatcctcaatgtaggctggggaacttaaaatgtttgttaaggccgggcgcggtggctcacacctgtaatcccagcactttgggaggccgacgtgggcggatcacgaggtcaggagatcgagaccatcctggctaacacagtgaaaccccgtctgtactaaaaatacaaaaaaattagccgggcgtagtggcgggagcctgtagtgccagctactcgggaggctgaggcaggagaatggcgtgaacctgggaggcggagcttgcagtgagccgagatcacaccactgccctccagggtgggcgacacagggagactccatctaaaaaaaaaaaaagtttgtttattaatatcttttgtacaaataaatatctacgtaggcaaacccacataattctatatgtgtgtgtttatctgtctacccatgtatgtctatatacagatctagctatcattttttccatatgaatacagagtaaagatataggaggtaaaaggataaataggtatttgtacttatagcaatgtaaagaaaaacttcaatgactgcaaaatcttatttgccccttaaattttatccataagagtacacaaatggaggtatactctgacctgcatcttgctgcatttgatgttttcaaagaaagaattggtttttgttgctcacaatctgttagcaaaagtgcactaaggccatcgagtcatttattgccaagtcaaacatggcctttttaattctggtgaatgggaaaatatggataaactagccttagcttgaaagccttaatccaaatttgcaaatgagaaataattctctttaaagcttccctcaattttagagcttttattttcaaatatgtgacatagaaatagaatcttcttctctttctttctttcttttcttttttttttgagacagagtctcactctgtcacccaggctggagtgcagtggcacgatctcagctcactgtaacctccgccttccaggctcaagcagttcttctgcctcagcctcctgggtagctgagtttaaaaccacatacgccaccgcgcctggctaattcttgtatttttagcagagatggggtttcaccatgttggtcaggctggtctccaatttctgaccttgtgatctgcccacttcagcctcccaaagtgctaggattacaggcatgagatactgtttccggcttttttttttttttttttttttttttttttgcagagtttcactcttgttgcggaggctggagtgcaatggcaacatcttgactcactaaaacctctacctcccaggttcaagtgattctcgtgcctcagcctcccgagtagctgggattacaggcacccaacaacacacctggctaaatttgtatttttagtagagacggggtttctccatgtgggtcagcctggtcttcaactcctgacctcaggtgatctgcctgcctcagcctcccaaactgctgggattacagatgtgagccacagtgcctggcagaaatagaatcttatcatattgttgtgtttgctcaagtagtaacattttgggtaagaaaattaaacaagaggtctctgactttaagatggactgctatactgaaagcaaatttcagggtgttttcagatgcttttttctttggatttagatacagatataacatatgtagctagagaaatatatacagccaggtgcagtggctcatgcctgtaattccagcactttgggaggccaaggcaggtccttcacttgaagccaggagttcaagaccagccaagccaacatagcgacaccccatctctactaaaaatacaaaaattagctgggcatggtgagaccagctgagccaacatggcaaaatcccgtctccactaaaaatacaaaacttagttgagcatggtagtacacacctgcaatcccagatactaggtaggctgaggcatgagaattgcttcaacatgggaggtggaagtttcagtgaaccatgatcacaccacttcactccggcttgggtgacaaaatgagactctgtctcaaaaagaaaaaaaaaaaaaatacaaagacccagggtcatagaaacatatagagacatacatatgtaacctgaatttgtgactatgttttataacatctcacaaatgtaaagtaagtcagaggttatgtccgtactcatgctcctcaagatagatgaatgcgattccatgaggcaaatttaataagccaatgagctcaagtcagctgttttcaatcagccaattagctgagcccaggcgattcctattagccaattagctcagcgcaagtgattccattaggccaattatgtcagcttaggcaattacaatcagtaaatttgctcagcccaggtgattacatttcgccaattgactcaatccaggtgattccaatcagtaattcgctcagcctaggtgactttaaacagccaattagctcagccttaacaatttcaatcagtcaatgagatcagcccaggtgactctaattggccaattaactcagcctcagtgatcctaatcagaaagctcagctcatgtaattttattttacttttttgacggagtctctcactctgtcgtccaggctggaatgcaatggcatgatctcggctcactgcaacctccacctcccgggttcaagggattcccctgcctcagcctcccaagtagctgggattacaggcatgtgccaccacacccagctaattttgtatttttagtagagacaaggtttctccatgttgtgcaggctggtcttgcactcccgagctcaggtgatccacctgcctcggcctcccaaggtgctgggattacaggcatgagccaccgcacctggctagctcatgtgattttaatcgggaaattagctagagaaattctagagaatccaatcagccagttagttagaactgtgattccaatgagtcaattagttcagttcagaagtatctaattaaccaattagctcaggttagttgatttcaataagacaaatagttctgcacaggtggatcaaatcagccaataatctaaatagtgactgtagattcattagatcagaatggcagatttaaacagcatttttctacactgagaagaaaagcagggcccaaagactctaatctggtcataaagcattacattgctgtattgtcagcttgtttccaagaccttgcctttgacagtgaagctttgtttatgtaaacatcattgtatgtctgtgttccattatggatttctattgtgccataaagtagactagtaagtccacatctgcattcttagtatatactaaggtattaaaaatgtcatttgctgaaatcttgtatattaataaacatttatgtaattataattatataattctgtacgtgtgtgtttatctacctacatccagatgtatccaggtttgtacctatattcacaaaaaataaagatgtagaaggtgaaagtgttgatcgtaattgatatcaatagtaatatacaaagataattccatagaggtataaaattttctgccgtatgaaatatacctagaatgctactcaaatggatgtatgctattacctaaatctatcatcatttaacttatacaaagtaagcatagttttttttttttaatggagtcttgctctgtcaccaggctggagtgcagtggtgctatgatcttggttcactgcaatctccgcctcctgggttccagtgattcaactgcctcagcctcctgagtagctgcgactacaggtgcctgccaacaggtctggctaatttttgtatttttacttagaggcaaggtttcaccatgttggtcaatctggtctcaaactcctgacctctggtgatcagcccacttcagccttccaaagtactgggattacaggcgtgagccaccgcgcctggccagacactttcttctgtagatttggaaacagatataagacacatatggctgggcatggtggctcacacctgtaatcccagcactttgggaggccgaggcaggcagatcatttgagatagggaattcaagaccagcctggccaacatggagaaaccttgtctctactaaaagtacaaaaaaattaggtgggcattgtggcacatgcctgtaatcctggttactcaggaggctgaggcaggagaatcacttgaacccaggaggcagaggttgcagtgagctgagatcatgccattgcactccagcctgggcagcaagaatgaaactctattttaaaaaaaaaaaagacatgtatataggaaaacataaacaaacacaaaggcttatatacatatgtctaattaatgcctatttgtgagtatgtcttgacaaaaagccccaaaagaaaagtatgtaaaaggttattaccttactcattctcctcaagacacaatcaatgaactcagcccatgtgaccctagtcagccagttagctcagcccaggtgattacaatcagccaattaaacgagcccatgtgataccaattagtcaattatatcataaaggttaatacaattagccaattagattagcccaaggtgattccaatcagccaattaaatgagcccaggtgataccaattagccaattatatcagtattggtgtgttggtgtgatcagacccaacaccgggttgtgggggtgacaaagtccagtggagtcaaaggattgagaaaaagtttgagagagaaaagtgggaccagggggccattgctagtgtatggaggctgcgaaggccccgagctctgggatgccatgctatttattggtaatccaacaaagaaacagatggtgagaatgtggggtcgaaagggcaagtgcatgatctacagctgtgatggtttagcatatgctctgctacttgagataatggagagcaggttcttttaactcaagatacagtcaatcctggaagagcaaggagcaaggagccagcaagtctagacacattccagggccacgagccctggattctattcaagccatgagggattttatgccctgggcttagattatggtgcttcagtgtagccttccaccctttagcacagagcttggtgttccaaaggccacagaagtttttataccctggaccccagacatgttccaagactcttttacattatgtcagacatgcaagccctgcctcagcttctctcccaacactcagcttttctcccaacatgccccccttttctttttcataaaaccgccacagctatcattgcttgttcttgaagtcagctttctctcagaggtggcttcatcttcagaggcagctttcgcatctgcagactaaaagaagacagcacaagcacacaaccaccagaacaaaatccacaaatgtagagcctccaatggccttcaactataaatcttttagaatgggataatagttttttaagggtctcagttacaatataaatagatggtgatgtctccatggtctatttagaggtacagggatccaaactccttctctggctttaattatcaagatagtttgatttttatcaaaggttgaattaatgtaggtaaacaagtgacattcggggcaagtaataaggcatatatttatatcaagagtaacatttcctattgctagcacaactttgaatccaaaaggtcctgttggagagaaaagaaagagcatttttatccttaccttcctcccctctattccttgtatatttgccctctcagattttgcttggactttgagccatagctaatttccataattcagaatgttcctgtctgtccctgcaaatctctgctagtctttgctagcctcaacttttgtacctctttagggcactgaccttatattgctagtctttgcttttgtacctctttagggcactgatcttatattgctagtcttcatctatctctatttatctctatctctctatttatctctgtttatctctatctctctatttatctctatctctctatctctatctctacttatctctagctctacttacttagctctacttacttagctcttattcaaaatggagttgctctggtttgaattcttcccacatatctcccttttcccttttacaagaggacccttaatcctaggggttgcagaaggatgaaggtccatcttctgtaacttcttcatgctgaataggagtgacgataatcctgcctaactattagggactcttgtattcagggtagagaggagctcagtcagaaagcattggtccgttaagcatccataggtaaaaccctggcattccagtagtttctcagcttcctgtgctgttttcttgctctgtcccatgttataggggttgcatccacatggtttcattcatctcctgcaaaaacacaagcgtaccctcgatcccacattagtaaacctagcgaaacagaagcaaaaagttttgtggttgtaactgggaggcatgccattgctgaagcatttgttaactcagcttctgcctctttggttaattacagtgaggtaaaactttccactgataatgagaaacaggccccttctaacagaaggcacagagaaagcaaatcaaggcttctcaaaccttcaatttgcactgtaccggtgggcccactagatgctgtggctcatgatagatcttcagatatttggtgggtaccccattgttgcaataagtctctaccccataaattgactggaagaggtgtaataatatgctgaattgtcccttcctgaccaggtgtcccttgacatggtaaaatcaaggaactctgaaaaacttcctaggctgttcctatgccaatgatacccatggaagcctttagtttgggccagtgctggggccattgatataaagcaataatagagacaccagctccagtatccactagtccttcaaaatcctttccctgaatagttactgtgcaaataggtcttttgtcaaacacttgaataacccaatatacagcctttcttgctgaattagtactaccaaagcctcctgttcttttcactgtgctgcttcctggttttatgtaaggtaagagccacaactgagcaattctttctcctggggaagcagaccacggagttgaggaactaataactaattgaatttctccactataatcacaatcaattattcctgtatgcacagcgacacctttcaaatttagactagaccttccaagtaatagatgaactgttcctgagggtaagggtcccctaactcccatagggaccttctttggttgctcccctggaagtaaggagactggaattgtgctgcagaggtctacggcagcactgcctgctgtgcaaggaaacaattgttgtacatttgtaagggcactggctgtgtcatatatgcctcagtttgttgaggtgctctctgaataaacaagcctcagattccactgggtcttaccgcatgcctcaccctcttcataataaattccttaagaaattcaagtaagcagaatgtttgctttcactttgtgccattgttatcctggttcttccgagcattccgctttcctaccgagcttcttttagttgtccttgggtgtcctttgaggatgcgtcatccactttcacacactgtagggtttcttcaccggggtctctgttgccccacattgggcagccaggaatgttggggtaatcagacccaacaccaggtcgtgggggtgacaaggtccagtggagtcaaaggattgagaaaaagacagtttgagagagaaagatgggaccaggggccatcgctagtgtatggaagctgtgaaggcccagagctctgggagcccacactatttattggtgatcaaacaaagaaacaggtggtgagaatgtggggttcgaaagggcaagtgcatgatctacagctgtgatggtttagcatatgctctgctacttgagataatggaaaggagattcttttaactcaagatacaatcaatcttgggagagcaaggagccaggagccagcatgtctagacacattccagagccattagccctctggattctatccaagccacgagggattttatgccctgggcttagattatggtgtgtcagggtagccttccatcctttagcacagagcttggtgttccaaagaccacaaggggttttagaccctggaccatggacatgttccaagactttttacattatgtcagacatgcaagccctgcctcagcttctctcccaacacccagcttttctcccaagaatggtgaatctaattagccaattagattaacacaaggtaattccattcagccaattttcttagtctagttagatccaatgagccaattatctaaatagtgactacaggtttatcaaaacaggcccaaactagtggatgtgaaaagcacatacaaacattgagaaggaatgcagggtcctgaagtgcaaacctgaactgcatgagtaacctgacttagtgtcagcttatttctgaggcctatgctactgaagattaaggattttttatgtttataatattgtatgtctatgttcaattctgaaatgctactgagcaaaagagattgaaagtaattatatatctgtaattatatatcaattctgaaatgctactgagcaaaagagattgaaagtaattatatatatgtatataagttctagatccatgaggatctagaactagaaatatgatttgacccagccatcccattactgggtatataccaaaaggattataaatcatgctactataaagacacatgcacatgtatgtttattgtggcactattcaaaatagcaaatacttagaaccgtcccaaatgtccatcaataataggctggataaagaagatgtggtacatatacgccatggaatactgtgcagccataaaaaagcatgagttcatgtcctttgcagggatatggatgaagctggaaaccatcattctcagcaaactatcacaaggattgaaaaccaaacaccatatgttctcactcataaggggagttaatcaatgagaacacatggaacagggagggaaacatcactcactggtgcctgttgggaggtggggggttgggggagggatagcattaggagaaatacataatgtaaatgatgaattgatgagtgcagcaaaccaacctggcacatgtatgcctatgtaacaaacctgcacattgggcacatgtaccctagaacttaaagtataataataaaaaaagattttaaaaatcatattcttaaagagtgtaagctaaaaggcagctagttgattctacaaaggtcagaaaattgacttgtgtgtaagaagcctcactgatacaagctatgagatttgggatcactgcttgaattcatggagtctatcaaaatatcattattcctttccactttgtagaatcatgagtcctaagggtaaataatatacagaaataaagtaaaatcagaagcttcaaacacttaacatcttcaaactaatagtacctatagtgtcaaccagagaatataagggcaaccagcaggtggtggaaatatcagcaaacaaaagaaggttggtgtaaaccagctggccagagttctgtggaaagagaatagttgccaagagcaagagaaattaagtctatcatttttcctacctggaaaccaccaaatagaaatgcctgttatactggaagtaacttgtaaaacagaaggttgttgaagaggtggggatgtcattaaaacattttaaaagcccataaaaatcttaggaaaatttcttactcttcaagaaagctttaagagtacatccagcatgggccacatgtatctaagattactcagatccagctggtttctctttgacactttatggcaaactaaaatctatcttccaaaaaaacagtgaagcattgaccttagatatttaattgtctattgagatgacaactcaatgaccttgtctagtttggaaaatacaaagaaatagccatttaggtaaccgtatatgagccagaatttggtggaatctaatcttatatatggccctaactctgaccattaatgagatgttgggttccattagttcattttatttaaaaattggaaaacatattaattcttgcaatagtctcatccctatgcaagcaggtgtctctttgcttatgaagataattagaccataggtttgatggcactttgactttaaaaaaaagacttactaggttgttttttttttttttccaaaaaaaggagagacagtcctgattaggtctctgttgccaaatcctaaagattctaggccctataaagtgagacattaaaaggattatgcatcataataaggccattctgggtaaagtcatttctattcatctccattactttgagagtaatctgtcaaagacaaattaactgccagaggaaacttatgaaaaaatatttgttctcaaaagctgtaacgtatttattttaccttcagtctccacttgccaaaaccataaattgcagaatatctccattaaagctcatgccaaattccaagtctctcctctggctgtcatttgcgagatggctcctcttcaggttcctgttagctatgtgcaaagacagcctaggcaatgacaaatcaagagataaataatttctgagatttcctgagttgattctttcgatcccagcactgcttttcattagaatttctaagtccctcttcctataacagaactaccagccccaatgtgcttgggagcaacttatttgctctggaaattagcacaatatgaagactcaaggctgagacctacaaaacttgggttcaagttaagttgttttttgtttgttttgtttgtttttatcaaatgggagtatgactttgagtttatcacctcacatcctacttggaggatccaaagcatttttctttgagcgtactcttgagatatcataaatacaatcccattgttaggagaggtcccagagcccaattccaacccacttgtccttgaaccttctctaaaacaacctgaaaaagaatggtcttggagcttatgcctgaaagcttccatgccagagaactcacccccacccactgccaccaccagaaaaccagtccagctgccctgtttgtttggtttgattcagttgtgaagcagctttgtagagagtgaagagcaagatactagaaggtacacaaacttcagtgttatggaaaattgattgtatttctatcctatgactaattatttgtcctcacttttgtttacaaaatagaaggctattataaccttgtgtcttacaagtttggtgataattacaaacaggctaagcattcagtaaaacatcatttttctcctatttgctctaactgaagacaggattactttgaatgaccagaacagtcgtatgcttgcaatagctaatttacaataactctagagttcttgaagtttgccctagggcattaaagatgccaactatggcctatgagaaatatcaaagcatgagacaaggccattcaataagaagaggtcagaaatttctcaactgctgcaaaattttttagcaataaactcatttctggtaagtcttttacatcacccactcctacctttacatacaaatgtgaattattacctaatttttgtatcagtgaaagaatttgaggatagcctgaaatgatattgtgggttttggagcttacaaatcttggagaaaacttatctcagagtcaaacatggcctggtgattacctaattcccaggtaggcctgtaaagtctctctgcgatcctgctggcaaatgctccctgtcttcattacacaagaccagccacggaaacaaatgggtatcagttattttaactccaactcttagaaagtgcttgtatttaagtttttgatcaaatgtatctattcatatgttttggaaaattaaatcgaatagagagattaaaatgaaaaataaacttcctgccccatgcctaacagtctctaacctcttttcgtacaggctaactgtgtttggccttttctgcattgctacagagaaatatctgaggctggataatttataaagaaaagaggtttaattgactcctggttctgcagcctgcacaagaaatgtggtgccagcatctgctcagcttctggtgaggcctcagggagctttactcggcagaaggtgaaacacctcccaccaggcctcaccgccaacactggggattacatttcaacatgagatttggaagggacaaatatccaaactatatcagtaacactatttaactcttaaaactatttctaggctgggcatggtggctcgttcctgtaatcccggcactttggaaggcaggtcacttgaggtcaggagtttgagaccagcctggtcaacatggtgaaaccccacctctacaaaaaatttgaaaattagctgggtgtgatggtgcatgcctgtaattgcagctactcaggaggctgaggtgagagaaaggcttgagcctggggggcagaagttgtagtaagccaagattatgccaaggcactccagcctgggggatagagcaagattctgtccccactcccacacacaaaaaaaagatttctaaacttatatttctgattatcatccacctttaatctgttattgcactatattccttgattaatttgaaatagcatttactgacgcgctattctgacaaaagatttaacttccttatatcatcccaagccttcccttaatactcctgccagtatgattctttgcctactttttttgtttttctattaattacttttgtaactttaaataaatgttcaccattatatttctttttacagcaactataggaaatacctcttctctagttgagataaagtttattctctaatttactaatgtttcaaagatcacctgaccttatttgcagagataatattttttaaatctcaaccttgcaaactgtcagggttgataatatttgcattcctttccaagatgatacctgtcttctgtcctttatctatggtttattatgaaagcaggaagtgaatcatgttttgtttgttattcctcttccaagtactatttgctgcagaaccaagcccttgtttaggattaattttgtgggttttgtatagctatttggatttttctggagtttctaattctcttcttacttcttcatattgtctttaatatgtttttaagtagttctatcttcctagggatcatatgaaatctatgaaacaccattttttacaaaatgtctccttgttggagcctctgttttcttccttctgtctggagtgctgcttccaggcctgctccaaagctgcatcctggcactcctccttctctcggtcaccctggatccacctttctttggatcccatgtcttccacattcttagcctcctcattttgcttaagaaaatcatccagtaacatcctaagaaagtttgaggagaaacttcttagtttctgtaaatatttttttattctctattcatccagattgagtgtttggcttggtatttttctctttttttggttttgcaatgcatttttctcttttttataatactttaagttctagggtacttaagttctaggtttgttacataggtatacatgggccatgttggtttgctgcacccatcaactcgtcatttacattaggtatttctcctaatgctatccctcccccagcccccaaccccctgacaggctccagtgtttgatgttccccaccctgtgtccatgtgttctcatagttcaactcccacctatgagtgagaacatgcggtgtgtggttttctgtccttgtgattgtttgcttagagtgatggtttacagctttatccatgtcactgcaaaggacatgaactcattcttttttatggctgcgtagtattccatggtgtgtatgtgccacattttctttatccagtctattattgatggacatttgggttggttccaagtctttggtatattgcatagtgccaaaataaacatgcgtgtgctgtgtctttatagtagcatgatttataatcctttgggtatatacccagtaatgggattgctgagttaaatggtgtggctagtcttaaatccttgaggaatcactacactgtcttccagagtggttgaactaatttacactcccacctacagtgtaaaagcattcttatttctccccatcctctccaatatctgttgtttcttgactttttaattatcaccattctaactggcatgagatggtatctcattgtggttttgatttgcatttctgtaatgaccagtgatgatgagcattttttcatatatctgttggctgcgtaaatgtcttcttttgagaagcatctgttcatatcctttgcccactttttgatgaggttgtttgtttttttcttgtaaatttgtttaagttctttgtagattcgggatattagccgtttgtcagatgggtagattgcaaaatttttctcccattctgtaggttgcctgttcactctgatgatagtttctttcactgtgcagaagctctttagtttacttagatcccatttgtctattattgcttttgttgccattgcttttggtgttttatttacgaagcctttgcccatgcctatgtcctgaatggtattgcctaggttttcttctagagtttttacagtgttagctcttacatttaagtctttattccatcttcagttaatttttgtgtaaggtgtaaggaagggatccagtttcagctttctacatatggctagccagttttcccagcaccatttattaaatagggaatcctttccccattgcttgtttttgtcaggttcataaagatcaggtggttgtagatgtgtggtgctatttctgaggtctctgttctgttccattggtctatatttctgttttagtaccagtaccatgtcatcttgattactgtagctttatagtatagtttgaagtcaggtagtgtgatgtctccagctttgttctttttgcttaggattgtcttggctatgcgagctcttttttggttccatatgaaatttaatgtagtttttccaattctgtgaagaaagtcattggtagcttgatggggatagcattgaatctataaattaccttaggcagtatggccattttcacgatattgattcttcctatccatgagcatggaatgatcttccatttgtttgtgtcctctgttatttcattgagcagcagtttgtagttctccttgaagaggttcttcacatcctttgaaagctggagtcctaggtattttattctctttgtagtaattgtgaatgggagttcactcatgatttggctctctgtttgtctgtttttggtgtataggaatgcttgtgatttttgcacattgattttgtatcctgagactgctgaagttgcatatcagcttcagcaggttttagcctgagatgatggggttttctaaatatacagtgtcatctgcaaacagagacaatttgacctcctcttttcctaattgaataccttttatttctttctcttgccaattgccctggccaggacttccaatactatgttgaataggagtggagagcgaaataatcattgtcttttgcctgttttcaaagggaatgcttccagtttttgcccattcagtatgatatgacaaactgtaggtttgtcataaatagttcttattattttgagatatgttccatcaatacctagtttattgagagtttttagcttgaagcattgttgaatatttttgaaggacttttctgcatctactgagataatcatgtggttttttttcattggttctgttaatgtgatggattacctttattgatttacatatgttgaaccagccttgcatcccagagatgaagccaacttgattgtggtggataagctttttgatgtgctgctggattaggtttgccagtattttactgaggattttcacatcgatgttcatcagggatattgacctaaaattctctttttttgttgtgtctctgtcaggcttttgtatcaggatgatgctcacatcataaaatgagttagggaagattccctcttcttctattgatggaaatagtttcagaagaaatggtaccagctcctctttgtgcttctggaagaattcagctgtgaatctgtctggtcctggacttttttggtgggtaggctattaattattgcctcaatttcagaacctgttattggtctattcagagatccaactctttcctagtttagacttgggagaatgtaaatgtccaggaatttatccatttcttctaaattttgtagtttatttgtgtagaggtgtttatagcattctctgatgacagtttgaatttctatgggatcagtggtgatatcccttttatcattttttatttcatctatttggttcttctctcttttcttctttattagtctagctagtggtcttattttgctgatcatttcaaaaaaccacctccaggattcatcgattttttaaaggttttttttttgtctctatctccttcatttctgctctgatcttagttatttcttgtcttctgctagcttttgaatttgtttgctcttgcttctctattcttttaattgtgatgttagggtatcgattttagatctttcctgctttgttttgtgggcatttaatgccataaatttctctctacacactgctttaaatgtgtcccagagattctgatacattgtgtctttgttctcactgatttcaaagaacactttatttctgccttcatttagttatttacccagtagtcattcaggagcaagttgttcagtttccatgtagttgtgtggttttgagtgaatttcttaatcctgagttctaatttgattgcactgtggtctgagagacagtttgttgtgatttctgttcttttacatttgctgaggagtgttttacttccaattacgtggtcaattttagaataaatgcaatgcggtgctgagaagaatgtatattctcttgatttggggtggagagttctgtagatgtctatgaggtctgcttggcccagagctgagttcaagtcctggatatccttgttaattttctgtctcattgacctgtctaatattgacagtgggatgataaagtctcccattattattgtgtgggagtctaagtctctttgtaggtctctaaggacttgttttatgaatctgggtgctcctgtattgggtgcatatatatttaggatagttagctcttcttgttgaattgatctctttaccattatgtaatggccttctttgtctcttttgatctttgttggttcaaagtctgttttatcagagaccaggattgcaacccctgctttttttttttgctttccatttgcttggtagatcttcctccatccctttattttgagcctatgtgtgtctttgcacatgagatgcatctcctgaatacagcacaccaatgggtctttactctttatccaatttgccagtctgtgtcttttaattggggcatttgaccccaatatatttaactttcttcatgaaaagcaaatttttgctttttttacacactctttatgcagaattgtttttcttagatctagtagtttttattatatatattaattacattaactcttaaaaacctaatttttagtgaaatccctaggaagtaattttggagtgtttggcatcagtatttgtagacaaaaaccattttatatttttaatagaagtttttttccaaattctctgttaattagcagatctaaatatgattagcttttctatatcatataaaaataagattctggtcaggcatggtggctcatgcttgtaatcccagcattttgaaaggccaagacacaaagattgcttaagcccaggaattcgaggcaagcctgggcaacatggaaaaaccccatgtctacaaaaaatacaaaaattagctcagcatggttacctacaccggtagtaccagctacccaggaggctgaggtaggagaattgcctgagcccaggagattgagagtgcagtgagccatgataaaggcacttcactccatcctcaatgacagagactcttttttaaaaaattaaatgccaaagcagataaagtagaacttattggactttgggggctggggcttgtttttattattatctcaacagctttgtggctacaggtggtgtttgattacataaaagtttttcagtggtgatttctgagattttagtgcacccatatcccaagcagtgtacactgtaccaaatgtgtagtcttttatccctttctcccatctctttcttttccccaagcctctggagttcattgtataattcttattctttccttttttttttgagacagtgtttcgctcttgttgcccaggctggagtgcaatggtacaatctcagctcactgcaacctctgcctcctgggttcaagtgattctcttgcctcagcctcccatgtagctgggattacaggcatgcgccaccacacccagctaattttgtatttttagtagagacaaggtttctccattttggtcaggctggtcttgaactcctgacctcaggtgttccacccacctcggcctcccaaagtgctgggattacagttgtgagccccagcacttggctagctcatgtgcttttaatcaggaaattagctatgttctagagaatccaagcagccagttagttgaaactgtgactccaatcattcaattagctcagttcagaagtatctaattaaccaattagctcaggttagttgattccaataaggcaaatagttctgtacaggtggatcaaatcagacaacaatctaaatagtgactatagattcattaagtcaaaatggtggaagtaaatagcacttttctacactgagaaaaaaagcagagcccagacatgctaatctggtcataaaggattacattgctgtattatcagcttatttccaagaccttgcctttgaatgtgtatctttgtttatgtatctgtaaacatcattgtatggttatgttccattttggatttctattgtgccataaagtatactagtaagtccacatctgaattcttagtatatactaaggtattaaaaatgtcatttgctgagcatcttctatattaatagacatttacataagtgtacttatataactctgtatgtgtgtatttatctgtctaactatatgcagatgtatccaggtttgtatctatattcacaaaaaataatgatgtagaaggtgaaactgttgattgttgatatcattagtaatatacaaagataattccatagaggtataaaattttctgctctatgaaatatacctagaatactcctcaaatggatgtatgctcttacctaaatccattggcatttaacttatacaaagtaaccattggttttttgttttgttttgtctttgtttttttgagtcagactctcactctgtcaccaggctggagtgcagtggtgcaattatctcggctcactgcaacctccacctcccaggttcaagcaattctcctgcctcagcctcccaggtagctgggactacaggtgcctgccactgtgcctggctaatttttgtatttttagtagagatggggtttcaccatgtgggtcagggtggtctcaaactcctgacctgaagtgatcaacccacatcggccttccaaagtgctgggattacaggcatgagccaccgcatccagccggacactttcttctgtagatttagaaacagatataagacatgtatataggaaaacagatacaaacacaaaagcttatatcatatgtctaattaatgtctatttgtgagtatgtcttgaaaaaaagccccccaaaagaaaaatatgtaagaggtcattaccttactcattctcctcaagacgcagtcaatgaactcagcccatgtgattctactcagccagttagctcagcccaggtgattccaatcagccaattaaaggagcccaagtgataccaattagtcaattatatcagtacaggtgaatccaattagccaattaggttagcccaatgaaattccaatcagccaattaaatgagcccaagtgataccagttagccaattatatctgtaaaggtgaatctaattagccaattagattagcccaaggtgattccattcatccaattttcttagcctagttagatgcaatcagccaattatctgaatagtgactgcaggtttatcaaagcaggcccaagctactggatgtgaaaagcacatacctacattgagaaggaatgcagggccctgaagtgccaaacttaacagcctgtataacgtgactttgctgtcagcttatttctgaggcctatgctactgaaggtgaattttttttatgtttatacaaacaatattatatggctatgtttggttctaaaatgctactgagcaaaagagattgaaagtaagtatatgtctgtataattagtatatgccaagtgattgaaaatggtctattggggaacatttcttgtatacataaatatttacataaatatactcatataatcctttatgtaagttttaaaaatctatttacctgcccaggaatggtgactcatgcctgtaatcccagcactttgcgaggctgaggtgcatgcatcatgaggtcaggagttcgagaccagcctggccaatatggtgaaactctgtctctactaaaaatacaaaaattagcctggtgtggtggcacttgcctgtagtcccagctactccagaagctgaggtaggagagtcacttgaacccgggaggcagaggttgcagtgagccaagattctgccactgcactctagcctgggtgacacagcaagactctgtccccatctccaacaaagtaacttctatacatgtataaatctatttgccctgtaaactagatctagaagagtacacgaatagaagaatgttgtggcatacatcctgctgcatttaacatatacgaaggaagcactggtcttttttgctcactcctggaaaatgaacatgcactaaccaatgggagtcattcactgccatgtcaaggttgacccttcccttcatgttgcacatatggccagaggtgaaccagccccagtcctaaggttctcacctaaattgtgaaatgcttattttttctcatctgggctttctttaagacatgggatcaacttcatttttatgagtatgtaacgtaaaagtacaatttggtctcttcatctctgtggctgaagtagtgtcattatggtaacggatagagtctagcactctttctggaagatagaccatcatactgaaagcaaatgtaattaattgttcatggtaccagaacacatttcaaccagaccatagtgaacattcacagaagtgccaattgtggcccttattggccaggccaaaacttctttctgagtaaggatagtcttactgatgtcaagcattcctgctttttttttttttttttttttaactggacagaaacccactaggctgatttattgagattcacaaataaaaagacctgggtgccaggtaacaaggacattttcacatttatgaaaaaaaaagtgtggcttttggcttggattttataaatcttcactgagctaaccatctgattggatttatgtagcctggaagtaaagaaaatagaaattaccttttaccaagtttacttcagtgccttttttctgtaaatgtaaatatggatataagataggttgatagacaaacatacacacaaagaatgagtcacatatgtatgtataggtcaagtttatttgtgcatatgtcccatataggacagaggtcatcttcatttctacccctgcatcccagataagttaaataagcaaattacctcagcctgtgtgattgcaaaaagccaattaggtcagatcaggtaaatataaccaactgattagctaaactggaaaagtgtagacatcaaggcaggctcaaaatgatggttgtgaataacacaggcataccctgagaagaaaagtaaggatctaaaatgctaagccagacataaagccttacgtcacactacgaatgtattacttcacaggccatgctcataaacatgaagtttcttcatgtttatacataacactttatggctgtgttccaatctgagatggtataaaggcatataggtgaaaagtaagtcttcatctgtgtcctcaggttaggctggaaaattagaaatgtctattgatgaacatcttttgtatgcataaatatttacatatacaaactaatataatcctgtatgtgtgtgtttatgtacttacatatatctatagccaggtctatctataattctgttaacattcatacagaataaagatatagcaaggcaaagtataagtgagcagtggttcatgcctgtaatcccagcactttgggaggccaaggcgggcagataatgaagtcaaaagatcaagaccaacctggtcaacatggcgaaattccgtctctactaaaaacacaaaaatcagctgggtatggtggcgcatgcgtgtagtcttagctactcgggaggctgaggcaggagaatcacttgaacctggaaggtggaggttgcagtgagcccagattgcaccactacactccagcctggtgacagagtgagactccttctcaaaaaagaaaaagaaataaagggcatccaaattggcaaagaggaagtcaaactgtcactgcttgtcaatgatataattgtatacctagaaaaccctaaagactcattcaaaaagctcctagatttgagaaataaatttactaaagtttcaggatacaaaatgaatgtacacaaatcaatattgcaggtatacaccaacagtgaccaagctgagaataaaggcaagaactcaaccactttacatcagctgcagaaaaaatatacttaggaatatacttaaccaaagaggtgaaagacctctacaaggactactacaaaacactcctgaaagaaatcaaagatgatacaaacgagtggaaatacatcccatattcatggatgagtagagtcaatattgtgaaaatgatcatagtgccagaagcaatctacaaattcatgccattcttgtcaaaataccaccatcattcctcacagaactagaaaacacaatcctaaaattcatatagaaaaataaaaaagcctgcatagccaaaacaagactaagcaaaaagaacaaatcttgagacatcacattatctgacgtcaaagtatactaggagactattgttaccaaagcagcatggtactggtataaacataggcaaatagaccaatggaacagaatagtgaataaagaaataaagccaaatactttcagccaactgatcttctacaaactaaacaaaaacatgaagtagggaaaagacatcctattcaacaaatgctgctgagataattagcaagccacatctagaagaataaaactggatcttcattgctcactttatgcaaaaatcaacccaagatggatcaaagacttaaatggaaaacttgaaactacaaaagttctacaagaaaacattgggaaaaactcttctacacattggcttaggcagagatttcatgaccaaaaacccaaaaacaaatacaacaaaaacaaagatcaataaatgtgacttaattaaactaaaaagcttctgctcagcaaaataataataatgataatcagaagagtaaacaaacaacacacaaagtgggagaaaatattcacaaactatgcatctgacaaaaaactgacaaagtttctacaagaaactcaaacaaatgagcaaaaaaccccacaaactatcctataaaaaagtgggcttagcacatgagtaaacaattctcaaaagaagatatacaaatggttaaaaaacattttaaaaagtgctcaacatcactaatgatctgagaactaaaaatcaaaccacaatgtgatatcaccttactcctgcaagaatggccataatcaaaaaaatcaaaaaatgacagatgttggtattgatgtagttcaaagggtacacttttacactgctgatgggaatataaactagtacaagtactatcaaaaacagtctggagatttctaaatgaattaaaagtagaacttccatttgatccagcaatcccactactgggtatctacacagagaaaaataagtcattgtttgaaaaagacacttgcacatgcatgtttatagcagcagaatttgcaattgaaaaattgcaaatgttgggaagcaggctaaatgcccatcaaccaatgagtggacaaagaaaatgtggtgtatatataccatagaatactactcagccacaaaaaggaacaaaataatggcattcacagcaaccttggtggagttggagattattattgtaagtgaagtaactcaggaatagaaaattgaacaccatatattctcatttatatgtgggagctaagctataaggatgtaaaggcttaagaattatataatggggagggtgcggtggctcacgcctgtaatcccagcactttgggaggccaaggcgggtggatcacctgaggttgagagttcgagactggcctgaccaacatggagaaaccccgtctctactgaaaatacaaaattagccaggcgtggtggcacatgcctgtaatcccagctgcttgggaggctgagacaagatagcgcttgaacctggaaggcagaggttgcagtgaggcaagatcgtgccattgcactccagcctgggcaacaagagtgaaactcaaaaaaaaaaaaaagaagaagaagaagaagaagaattatataatggactctagaggcttgggggaaagaacaggaagggggaaagggataaaagactacacattgggtactgtgtacactgcttgggctataggtgcactaaaatctcagaaatcaccactaaaaaactttttcatgtaatcaaacaccacccatagccacaaagctgttgagataataataaaaacaaccccccgcccccaaagtcccataaaattaattttatatgctttggcatttaattttttaaaaaagagtctctgtcatcaaggaaggagtgaagtggcttgatcatggctcactgcagtctcggcctcctgggctcaggcaattctacctcagcctcctggttaactggtactacaggtgcaggtaatgatgccgagctaattttgtattttttgtagacatggggttttgccatgttgcccaggcttgcttccaattcctgggcttaagcagtctttgtgccttggcctttcaaaatgctgggatcacaaacgtgagccatcgtgcctgaccagaatcttatttttatatgatatagaaaagctaaacatatttagatctgctagttaacagagaatttgaaaaaacgtctcctattaaaaatgtaaaatggtttttgtctacaaatactgataccaaacagttctaaattacttcctaaagatttcacaaaaaaaattaggtttttaagagttaatgtaattaatatatataattaaaactaccggatctaagaaaaatacttccacatagtgagcaaacataagaaaaatatactttcaatgaagaaagccaaaaatattttgtctagtttgaaattacttaaattgtctcaaattgaaaaaataaaaagaatgtagataaaaataaaatacagaaacttttaaaagtaatttaaaaaaggtcgggtgtggtggctcatgcctgtaaacccagcatttcgggaggccgaggcaggtggatcacctgacgttgggagttggagaccagcctgaccaacatggagaaaccgaatctctactaaaaatacaaaattagccggacatggtggcgcttgcctgtaatcccagctacttggaaggctgaggcaggagaatatcttgaacccgggaggcagaggttgcagtgagccgagattgcaccattgcattccagcctgggcaataaaagtgaaactccaaataaaaaaaaaagtaattaaaaaaagtataagctatgtatggaaatctagagtggtcaaaatgatatatttgatggatttatttataaagttttatgaaaattagcttttaatttttttaaaattttaaaattttaatttttattttttgagatggagtcttgctgtgtcacccaggttggagtgcagtggtgcaatcttggcccattgcaacttccacttcctgggttcaagtgattcccctgcttgagcctcccaagtagctgggactacaggcacctgccaccatgccaggctaatttttgtaatttagtagggacggggtttcacatgttagccaggctggtctcaaactccttacctcaggtgatctgcctgcctcgacctcccaaagtgttgggattacaggcgtgagccactgcgcctggtcaaaattagctttagtattgatagcacactaatacaaaagtataagttgattttctcttgaacaaaaattttgtgtattattactataacacaataacctatttttattcaccttttgaattaatttaaaaagagggagagtagagatgggtttttctcatgctgtctttcttgggtcatttgactggaaaactgaatttcctgcatcgaacagtaaaaggttttgtttttataagtcttctaataggccaggcactgtgactcatgcctgtaatctcagtactttgggaggctgaggcaggcggatcacctgaggtcaggagttcgagaccagcctggccaatatgccaaaagcccgtctctactaaaatacaaaaattagccaggcaaggtggtgaccgcctgtagtctcagctacttgggaggctgaggcaggagagttgcttgaacccaggaggcagaggttgcagtgagccaagatcacaccactgcactccagcctgggtggcagagtgagactctatctcaataaataaataaatacataaataaaaataataaataaatcttttaattattgctttggctaaatgaatgattattatttaatagtggactgtgatcccattttgttcaagtattttaaccctttgacatatttggcaggcttcccaaaattaaaattcagcttaaaagttgtgtgtatttgacccctaatatttgaatgctacataagtccaatgcagcatttgaaagagtgataaacagaattctttgatatgttaaattacatggaaagcattgtcaaattaaaaatttgacctttatcaacatattttaataaatgttatgatattcatttcaaaattatatgaaatctctaaaaatccaatgtatctgagtatatgctactagtaataattatggtttttatgataaattattatagactacaggtataatcattttttcatttatttcttcataaccattttaagtcattttcacagttaatggtttaattctgatgtagtttctaaaaacttcaaaagcacataacatcctagaggactgtgtctttaaagagttgtacgaaaagatggaaagggtccacacaagttaagtacaggcttctgataattttaggatcatattatatttggactggctaaggattgtgagaatttgaatgaagagacagactcctaaaaaactttgagcccaggctggggtgtggtggctcatgcctataaccccagcactttgggaggccagggcagacagatcccctgaggtcgggagttcaagaccagcctgaccaacatggagaaacctcgtatgtattaaaaattcaaaattaacaaggtgtggtggcgcatgcctgtaatctcagctacttgagactgaggcaggagaatcacttgaacctgggaggcagaggttgcagtgagcaaaactcgtgccatttccagcccaggcaataagagagaaactccatctcaaaacaaaacaaaacaaaacaaaacaaaatgaaaacaaaaacaaacaaacaaaaacacctgtaagcctacacaagacaaaaattaattgactattacaaaaatactgtgccacatttttaaagttatatcaggcagtatggaaatgttttagatatactttgtaaatcaactctgtggtccaagtcaaatgacctatgataacctctcaggtatcagtgctgcgcacctaaatttgggaaagtaacctagtgtttaaaaagacataaacttaatgttcagtgtggactcatggagaacctaggcagccacttgatatttcctgagttctttttttaaaaattaattaattaattattattattattatttgagatggagttttgctgttgtcacccaggctgaagtacaatggcatgatcttggctcactgcaacctccacttcccaggttcaagcgattcccctgcctcagcctcccaagtagctgggatgacaggtggtcacccccacgcctgactattttttgtaattttagtagaaattgggtttcaccatgttggccaggctggtctcaaactcctgacctcgtgatcaacccccttcagcctcccaaactgctggaattacaggcgtgagccaccacattcggaccctattcctgagttcttgaagtttccattatttaaagctacgcatttcactactaatcacagaaaagataaagtaatgtacattaaatataaattgaatgtgtgtttgtgtgtgtatgtctgtgtgtgtgtgtgtgtgtgtgatgactgttctaaattactacactaggttaagaccaattcctttttcaaacttataattcttagaagaatattaaaagtttatgtatgtttctgctacctcatgtgtgatttaaacatttatacagaaactgtcttttatttttttgagacagagtctcactctgtcacccaggctggagtgccgtggcacgatctcagcttactacaaccttggcctcctgggttcaagcgaatcttctgcctcagtctccctagtagctgggactacaggcacacaccaccatgcccagctaatttttgtatttttagtagagacagggtttcaccatattggctaaggtggtcttgaactcctgacctcgtgatctgcccgccttggcctcccaaagtgctgggattacaggcatgagccacttcgtccggcttttttttttttttttttttgactgagtgtcactcttgttgcccaggctggagtgcaatggcaccatcttggctcgctgcaacctctgccttctgaattcaagcaattctcctgccgcagcctcccgagtagctaggattacaggcacccaccactactcccaggtaatttttgtgtttttagtagagatggggttttaccatgttagtcagtctggtcttgaactcctgccctcagatgatcctcacgcctcagcctcccaaagtactgggattacagatgtgagcaccagacagaaaattgcatgcctggcaattgtcatttttaatgcatgttttctggtagtataaaagctttctgatgcaagaaggttgttattatagcggtagctaaaaggatactaagactttcttttcctcatgaagacttgctgaaaaggtctccaattacaaagatacttatttcactagaaaagttgtaaaactgttaaataagatattacagatacaatagtactgagcaaagctaactaaattcactagattgtttttgtaattgcaattgatgacactcagatccacttagagtggaaaaaacgtgttgacttttataaagagtcattggaagacctatgcacctaataatagaacgtcatgtataatctgctactgaagtctaatattactaaatgtggcaaggctctaatgcattatggcaaagcatattttcacaaggtaaagaaagctttttttttttttttgatggtctcactgtcacccagggttcagttttgtgatctcagctaactgcaacctctgcctcctgggttcaagtgattctcatgcctcagcctcctgagtagctgggattacaggtgtgcatcaccacgctctactaatttttctgtttttaggctaggctggtctcatactcctggcctcaagtgatccacctgccttggcctcccaaaatgctgctattacaggcatgagccactgcatctgtccagaaaagcttttaatagtctactgactgggaacaggaaaaccttttataatttagaacaaagagactgaatctgcttgccatctacaatgtagcaagacttcgggactttaaaccttgggttcataacgttacaactcaaaggggaccctctaaactcttgtaatcttattggagattttaattggagatcttgaggtaaagctaaccggagaagtttctcctcaaaagaagatgacaaccttgaggtagaaagctgtttccacaagataaaaaatgaagacctctctgatatcatgacgctcttagttcacagtttctttttttatgcctctacacacaacagaaataaaaaagggatctcttgtgtgctctcatggggtatacttatatatgtaaataattttacagccaacatttaaaaaaacttatgtcttaataggtaaaagatgaagggccactgcgggtgagaaattgtaatgggaaatttgttgcctcataatatcagaaacagaatattgatcaactgctcttggagcaatattaagttaaagataaacttattcagaatagcataaagagcattgccaggaggccattagtcttctgagtgatcatttgttaggtctttttttcaaaggcttagagtaaataaggcaatgattagaaatttatcttccataacaggctctatagcagattccaccataaaggctatggttacacaatagaatttaatatttttttaataaagttgtgctaaataaaataatttatctagtttacttactggataaacagagaagtatctgtgcagttggtagtatttgtagttgcacatggagaaatacatcgagtattacagagattcagttgtaggaaattaatgaacagactgcttggttgaaatgagtagaccatttaactagctaactgtttgatctatttaatcttagttggttggttcatgggaaccttggttaaaaagcatacttctggtcgggtgcggtggctcacgcctgtaatcccaacactttgggaagccgaggcaggtggatcacctgaggtcagaaattcgagaccagcctggccagcatggtgaaaccctgtctcaactaacaatacaaaaattagccaggtgtagtgacacatgcctgtaaccccagctacctgggaggctgaggcaggagaatcacttgaactcaggaggcagaggttgcagtgagctgaggtcgcaccattgcactccagcctgggtgacaagagtgagacttcgtctcaaaaaaaaaaaatcgtacttctaactcttgatattattttcctgataatcaaaatatagtctccctactgcattctattctctcaaaagttataaatctttgcatgcagtcatctctagaatgtcaagtggtctctctttaactggaatgatgaaaacttgaaaatgtatttgaccatgagaacaccataacctatgaatgacctgataagaacggaaatcaaaaataatggaaactgagagtgacactaagatgctgagttttggtcacactctgacctatgtgaaaacctaatcaaaagggggacattttttaaacaaaattattggaggccatcattctggactgagcttgttcactaggctcaaacagaccaaaccaaacaaaaatagagtcattcatgttgaatgcgacatagtcaaactgaaagtttaaagaaataggtggattctaaaactggccaggtcttgtttttctttggtgaaaagcagatttcgatacaaggaggtctcctctactgtaatcattttaaaaaataataacctgaagtacttgttttcactttataaaacccacagttctgctattttacagtggaatttgagactaaataagtacatttttgatggtgacaaagtaatatcaacgcctgaagttttgtttaatttcttgaaattgaggagataaccaaaagggagatattgttaaattaattatagcctaaagctgatcgcttttatgtttaattttgttaataggattttctgtacacagtaaactaaaagctagctgaatatgtaaatagattgtaacttattcttgtaccaaccactatgtttttgccaataaaagaacatcagctggtcaaaccatattccaataaggcaaatcccaagctgtaataaatctggctgtttctgtacctcatttctattttctgtatgtcactttgcttcttctgtatataaatctttttttccacgtggctgtgctggagtctctctgaggctactcgggacccataggctgcttaaaatttgcaaattattctttgctcaattaaactatgtgaaacttaatttctctgaagtttttttcatttaaaagttttcaaatgttttgtatgataaaaagataagttatgtgttgttggactttgattatcaaaaataagttatgttttccaaattattccatatcagctatgtcagctattttttccaagttattctatgttctttcaaaatgcttttgcaatttcttttttgtttttgttttgttttgtttgagaaagagtctcactctgtcacccaggctggagtgcagtggtgtaatcaatcatggcttaatgcagcctccaccttccaggcttaaacaatcctcctaccctagacacctgagtatcatcatgcctggttaattttttaaatttgttttgtattgagacaggatcttactatgttgcccaggctgcacttgaactcctgagcttcagtgattctcccatctcagcctcgcaaagtgttaggattacagatgtgagccaccatgtgcttcagtaatttcttgagattattcccaacaataaacagtactatgtgggcacaaatctaaaagcaatctggtttctatttttgaagtgtcactctccaggattttaagagtctaggacagctacttgaatagtgtgatccatggaggtacataggctttggagtcagagttgatcctgagtcccatcccagccacgtagtagctgtgggtattcagacaatttcttgatatggaagagttctatagaccacatatgcagaaaaagcagaatgggctgggtgtggtggctcatgcttgtaatcccagcactttgggaagccgaggcgggtggatcatgaggtcaggagatggggaccatcctggccaacatggtgaaaccctgtctctattaataatacaaaaattagctgggtgtggtggtgtgggcctgtaatcccagctactcaagaggctgaggcacaagaatagcttgaacccaggaggcggaggttgcagtgagccaaaatggcatcactgcactgcagcctggcaacagtgagactccctttcaaaacaaacaaacaaacaaacaaacaaagagacaaacaacagcagaaggatactgattacaaatatggtagcaatttttcatccctcctgtattcatgtccattgccaggtgcttttacagccattcccatcaagattcagaatctattttccaaacacttgatctggctggccttttttgcttagggcagtagaaacctgggaacatgacaatgtcttattttggggcctaggttcaaatagtgttggctacttctgtttttcttttctctctttttttttttttctttttttgagaaggagtctttctctgtcaccaaggctggagtgcagtggcgtgatcttggctgactgcaacccccatctcccaggttcaagcaattctcctgactcagccccctgagtagctgggactacaggcatgtgccaccacacccagctaatttttgtatttttagtaaagacaaggtttcaccatgttggccaggctggtctcaaattcctgacctaaggtgatccaaccaccttggcctactaaagttctgggattacaagcgtgagccaccatgctgggcctgcttctgtttttctttcagaatgctgccatcttcatgaaacaagcccatattagccagctggaggataagataccatggggaggagaagcaagttgcccctgttgacagccccagaagcagaagctcacccctagaagcacagctgccttcctagtcaatgagcagctcatgatacatgtctaaagaagctcagctgagaacagaagaatggccccactgagtccagcctaaatggctgagcagttcaattatgagctaatcagttttggatggtttgttatgctgcatagctaactaatacgtgcacccagtgcagatagaatgccaagatttaatgacaggttggttactagttaccttctaatgctgagcagcataaaagtactgatatttttccctatttaaagttagatgtcttgtaagataatgttgagaaatgcagaaatgtttttttttgaaatgcagaaatattgctgggtgtggtggctcatgcttgtaatcccagtactttgggaggccaaggcgggcagatcacctgaggttgggagtttgaaaccagcctgactaacatggagagaccccctctctactaaaaatacaaaagattagctgggcgtcgtttcacatacctgtaatcctagctactcatcaggaggctgaggtaggagaatcacttgaacccaggaggtggaggttgctgtgatctgaggtcatgccattgcactccagcctgggcaacaactgcaaaactccgtctcaaaaaataaagaaaagaaaagaaatgcagaaatacatgtggacatgtatgcatgtgattggcgcttatattcactcagtttcccacaccacaggagaaaacggataaccccagcctgaccattagtgtcaaggccaaatagcaaaataagtttgcctttaatctattttcttcctagtaaatattaaaggtccagacagtgtagagatctcaagacatagagttttcttctcttgttgccccatcatcctttgttcactgtctgttctctgaaagaaaggtgggcaacagtagtaagcagtggtttacctgtggttatttcattcctgctgccctcaggtgtggtgttgattgaggtctttggctcactctttatttttattttttagtcaggtcgtttgttttattgttgtctgaaaattatttctatattttggataacaatctttatcagatatatcttttgcaaatattatcttccatactgtgtctttcttttcattctctatacagtgtctttcacagagcaaaaatgcttaattttggtaaatttgacatcaatattttactttcagaaaatgaactagtggtatattatctaaattctaattgctaaatccagggtcatctagattttctcctaattacattctaggaattttatagtgttgcattttaaatttaggtctgtgatccatttgtgttagtttttgtgaggttgtaatgtttgtgattcatgcttttgtatgtggatgtccaattgttttagcatcatttgttgaaaggattctcttggctgcattgtattgcctttagtcttttgtcaaagattcattcagtgtattaatatgggcttacctctgggctctgcattctttccatcaactgatttgtctgttcttttaccagtatcacactgtcttgattactgtagctttatatttaatcttgaagctgagtagtgtctcaatcatccaattttattattcttctacaatatcgtgttggctactctaggtcttttgcctctgcatgtaggtttttgcctctatatgtaaacttcagaatcagtttttcagtagccccaaaagaagttcatggaattttgtttaaggctgtagtgcatcacagatctagctaggaggaactgacatcttaacaatatggagtatttgcattcatgatcatggtatatctttctactctttgctccttctgatttctttcattagataaaagtattttttttttaaggacaagtgcctcactccatcccccaggctggagttcagtgatgccatcttggttcactgcaacctacacttcccaggttcaagtgatccttctccctcagcctcccaagtagctgggactacaggcatgtgccaccatgccaggctaatttttgtatttttagtagagatggtatttcaccatgtttattggtactttcaccatgttatttctccttcttcagcctcctgagtggctgggattacagctgaacctgggaggcggaggttgcaatgaggcgagatcacaccactgcactccagcctgggcaacagagtgagactctatctcaaaaacaaacaaacaaacaaacaaacaaaagtttcaatataggcataaaacatctgttaatttacattatagcacatctacttaagattagttttatttcttataacaaagaatctttgtttcaattttttttataaacaagatcttactttgtcactcaggctggaatgcagtggtgtgattatagctcactgtagcctggaattcctaaactcaggtgatcttcctgccttgggctcctgagtaggtgggagtacagttgtgtcaacatgctctattaatttcctttttttgtagagactaggtctccctatgttgcccagcctaatctcaaactcctggcctcaagtgatactcctatcatggcctcccaaagttctggaattattggcatgagccaccatgccttgcctattttctctaaaagctttttttcacacacacacaaaaaatgtactgtcttttgttggttgcatattagaatataggttatatggagtatcctactttgaagcagcccattccagagtctacgcaaagttgtccttcctgaactactttaagacaattacctcatgtgggacaagggcatgggggcgtcccccagaaaattcaactgaaaataactactgaaacaatacatacctattcccaaacagagcaagagtgtctgttgtagatggtcaacctttgcagacagtagtagcatctatgtttaccaagagacatactgtgaactctgagaacaggttacaatgtttattgagtcaggagaaactcatccatcagaccatagccaaagacaatcaaatattaaacctcttccctgcacatgtgaaaacatcagatgtgcaaaaataaaacattgggagacaaggtcctcactgcatatatgtgggctttagtctccagtgagacacattgagtgcacatcaatttcactactgctgcatctgtcatacactacatttcatatatatttcatactatttttgaattttatattccatttgtctctaaatcagttcataaattaaaactacattatttaacttttcaattccttataacacatgacagaagatgtcacttcatatttctttctttctttttttatttttatttttttgaggcagagtttttgctctttttgtccaggctggagtgcaatggcgtgatcacagctcactgcaacctccacctcccgggttcaagtgattctcctacctctgcctcgcaagtagctgggattacaggcatgcaccaccatgcccagctaatgttttgtatttttagtagaggtgggatttcaccatgttggtcagctggtatccacctccagaccttaggtgatccacccacctcggcttctcaaagtgctggaattacaggtgtgagcctttatactttttacatatatctttattcatttattcttctttgcagtaaaatttctattttcagaacacaataagacggtgtctctgttggattcaactcaatttttaaactgattaaaagatcattgacccaattctgttgaatcttccttttcaaacatgtattgccactaacttttacttgtacagatctgttattcatgtttttcagaaatactttctgctaaatccttactaattttttaaaaatataatgttctaggccaggcacagtggctcacacctataatcccagcactttaggaggccgaggtaggcgaattacgaggtcaggagtttgagacaagcctggccaatatggtgaaaccccatatcaaccaaaaatacaaaaattagctgggtgtggtggcacaaacctgtagtcccagctactcgggaggctgaggcagaattgttgcttgaacctgggaggcagaggtttcaatgagccaagatcgcaccactgcactccagcctgggcaacagagcgagactctatctaaaaaaaaaaaaaaaaaaaaaaaaaaatatatatatatatatatatatgtacaaatatatatataaatttttctgtagaattctggtaatgtctttatttatagctatgaacatgaaacatgacattctattggtttaaattatttaactaatttgttagtggatttccaaatgctaaatctgacttgcatttctagcataaaataccctggatcataatataattatatgttttagtatgctgacacaatggcttccaatatttaaaatttttacattatatttatatgttctatatgactgtaatattctatatgtgtttgtttaagcaaagttctcatatccctcttatgaacacttacacataagtagtgggaagattgcctacattaaaactcttgaacagtctagatagcaacagtttatcaactatttaataagtagaatttctctctcaagtatataatgttggtgtttttctatatgagaataaccctttgagatatgtctctgtttcttctgtaaatattgaacattttacaatctctaactctgtgaggataaatgctgataacatttattcctaaaataaatcaacatttgcatgttagtttacattaaattgcacatatttgccccatttatgtttatatcaatatttaatttcaaggtttttttttgcactgtaacctttcacatattctactcaaggtttttttttttttttttcctttgaggtggagtttcgctcttgttacccaggctggagtgcaatggcgtgatctccgctcactgcaacctccgcctcccgtgttcaagtgattatcctgcctcagcctcccaagtaactgggattacaggcatgcaccgccacacccggctaattttttgtgtttttagtagagacagggtttctccatgttggtcaagatgttctcgaactcccaacctcaggtgatttcgcccgcatatgcctcccaaagtgctgggattacaagcgtgagccaccgcccccggcctcaagcttttcatatgctcacatttcctgattaaatatgaaagaatagtttgggccgggcgcggtggctcaagcctgtaatcccagcactttgggaggccgaggtgggcggatcacgaggtcaggagatcgagaccatcctggctaacacggtgaaaccctgtctctactaaaaatatacaaaattagcctggcgtggtggtgggcgcctgtagtcccagctacttgggagactgaggcaggagaatggcgtgaacccaggaggcggagcttgcagtgagccgagatcacgccactgcactccagcctgggcgacagagtgagactccgtctcaaaaaaaaaaaaaagaatagttttgctcaggaatttgaagattcacagaaaatttgctttttagcagaggaacacctaaaggaagcgcagaacccagaaagacacgctgacttcactgtctgttcttcgtatatcacactcagcattttcctctccctccatgtgagcctctttctttcttcagaaatcatagatgagaaaagcctgttccaaattccttcatttctctggggacaatagacagctgtaatcatttttcttgtttgtttttttctgttttgagaaggagtcccactctgtcacctaggctggagttcagtggcatgattttggatcattgcaacctccacctcccaggtcgaagctattttcctgcctccgcctcccaagtagctgggattacaggcgcgcaccaccacacctgactaatttttgtgttttcagtagagacggtgttttgccatcttggccaggctggtctcaaactcctgacctcaggtgatccgcctgcttcaacttcccaaagtgctgaaattacaggaaggagccaccacacctggcaaagagctgtaattgctgttggtaagttgtaactggagcgaatttttcaaaatattgctattttttttccaagtgcaacagctcatttcactttatttagctatgaataattgcgatctatccatactgacttaaaacacacaagttattatttttttttcacataaaaagtcaggagttaggcatacctggggtggtatggcagcttcaggaagcctttagggatgtctctgctccatcacccctgacatttgttttccattcttcatggtccaagatgagggctgaagatccagaacatctattaacatccatattttagaaaagcaagaaagctgtttttaaaatcatcgttgtttcatctacttaatttctgaatcttattttatttgtgcttttttcttccaacttctattttaggttcaagggtgcatgtgcaggtttgtgaaatgggtaaattgcatgtctctggggtttggtgtacacattatttcaccagccagatagtgaacatggtacttgataagttgtttgtttgtttgtttgtttgtttgtttgttttagagggagttttgctcttgctgcccaggcttgggtgcagttgcgtgatcttggctcattacaacctccgcctccaggttcaagtgattctcctgccatagcctcctgagtagctgggattacaggtgcatgccaccatgcctggctaatttttgtatttttaatagaaaccaggtttcaccatattgaccaggatagtcttgccctcctgaccttatgatccgtccaccccagcctcccaaagtgctgggattacaggagtgagccaccgtgcctggcccaatttttgtatttttagtagagacaagggtttagcatggtggcaaggctggtcttgaactcctgacctcaggtgatccacccgcctcagcttcccaaagtgctgggattacaggtgtgagctgccgtgcctggcagataggtagattttttatcctcaccctcctcacaccctctactctcaagtagaccctggtgtttattgttttcctctttgaattcatgtgtactcaatgtttagcttcaatttataagtgagaacatgcagtattttgttttctgttcctgcattaatttgcttataataatggcctccagctgtatccatgttgctgcaaagcacgtaattttattctgttttatggctgactcgtattccatggtgtacatgtgcctcatttttctcattcagtccactgttgatgggcacctagattgattacgtatctttgctattgtcaaaagtgctacaatgaacatatgtgtgcatgtgtctttatagtagaatgatttatatccctttggtatatatctggtaatagtgtagcaggatgagtcgcagacaaaactcctcagacgccagattaaagaaggaagaggttttttattcggccgggatcattggcagactcgtgtcttaagagccgagctccccgaaaaagaaattcttagcccttttaagggcttacaactctaaggggtctacatgaaaaagtcataatagatcaagtaagcgtgagaaacatgactgggggctacatacatcagctaacagaacaaaaagttttacagtattttctcatacagtgtctggaatttacagataacaccaatagttttggtcaggggttaataatattattattattttagccaccagggccaggtggtggtgccaaggtcgtctagctatttatcttacttctgtttcttttcaactttttgctttctcccttttctcctgtcttataaactagggaaaaggggaggttggggagaaactgagaaggacaacaggagaagtggcgacctcataccatatttccccccctttgagaattttcacttttagtgggagttcttactctcgtcctcacttttttagtctctttgtgagatagagcgatagtgatttgtataatacacatgtgctgaagttttctgatgaactaaagtaacaacaaaatattttatcatttgaaaaagcaagggtaatacacaggggagcagcaagcaagttcctatcactagcaatacacctacaatgagggttttaaatcctcctatagctggaaaccattttccaaataaagactcaggattaaacttgtgccaaacctgtacaggcacatgtgccacctttgtcatgtccctgactatgttttcaaccacctgtccttgatcatctatttgtaggcagtaattggttaagttaaattttccacaaactcctccttcagctgctagcaagtagtccaaggccagtctattctgatagatagcattcctcgtttgggtttcctgccgagctaaaacagtcaaagctctgccagtttcattagtaattatttctaagatggcctgcaaccgtatgatccgattgagcatgtaaatgggggttcggtatccccatgagccgtcttgtgcccatgtggcaggcccataatactgtatgatcctttcagggcgccactcattatctttccagtttcctataactatgcctctcttttctcgggaggcatagacagggaaacctagggtctcacctgtttttatgggtaataagaaaaaggacgacttaatagtgccaataacacaactgcctgcctatttattaggtaaccgaatgtaggctctgtgcccacatatccagtatagtccagcgggagccatccagtcctgatgagattctggatgagcccaagcagtttttaattttgaaaatttactaaatggattcttttcagtgtggtttatgccccaccaagtaattgtctttgttgtactgttatacaacttctgtcctatacaattaagctttcctacagggatgataaagtctttcccttctctagctatacagtattgtccaataattgaggtttttaggacccagaagttgctagcttgggttttctgaactggaattatatcaggagctggatcagtaggcaccaactctcgggcttcccaaggccatcggtctccgatagtggttcccccgcatacataacaagaagtaacattaagggaatgagctacattttctgctaattggagaaacaaattttttgtcttttttggaaattctggtgctggcagattcagctccttataaaaggtttgaaatactggtttgggagagcacttgtggacctcccctctaattaaaatggcaacttgggggtttaaccctgtcccatcaatccccagggttacacgttctccctttttccaatggggatctaggggattggtaattattagttctagtgggttacagtgaccagcagcacaggaggggttggcttcccccttctgaagataaaccgggtcctttttgttctttttccaagtagcccaaataacacatggccaataggcacaattttcacaaacccctgactcatgacaaacatatttattttttattctgtagctcctttcccagttaagagaatcacatcctattcctagctttttactattaatggctgcacaagcatcaaatcttaaagttatttgtttggggatttctttttcttctgttctagttattattttacttgtatcacctaggaaaaggccagttcttattcttatttcaaaaatggtggttgcaggaggctcagatgggttataacacacatcaggtcggtcatttcctgggctacatacattgtactgagtagcattatacaaacaagtttcttttaatgttcctatacatttataataactatagaacagaaacattgttttaatttgctgtcctacctcggtgacctgatgaatacactgggaacagtccccagtttgagtaagatcagttgaagcccttactgtataagtccaaaatttaagaaaaatgaatcccatgatgagcttctgcatgcttcggccgtgcgtggaccagtcagcttccgggtgtgactggagcagggcttgttgtcttcttcggggtcactctgcaggggttttctgggcttggtcttgcctcccaggtttcaggcactgcaggttttacacggctgtggtggatccaggttgggattccctctaccttcacagcggtgggagtgctcaggatgacagtctggggtcctttccaccgtggacacaaacaggctacgtttcagtccttgatccacactagatcacctggggagaaagggtgaactggggagaataagttaacagggcatctctcatttacccaggccgagattgtttgtgtaatttttcctgaagcctgtagctatcgctgtaactcaatttcacctaactctcggggagtgcctggaagtccccgcaatataggagggggcctatgatataatatttcataaggggaatatcctgttcttttagaaggggtacatctaattttaaataataccataggaagagcctgtatccattttaatcctgtttcttgacatactttccctaaactatttttgatagtccgattcatccgctctacctttccggaactctgaggctggtaggcagcatgcagtttccatgtgatccccaatacctttgccgtcttctgtaccaagtcagccacaaacaccagcccattatctgagccaatccgtaagggcagtccaaatctaggaataagatctcgaagaagcacacgagttacttcatgagctttctcagttcgtgttggataagcctccacctgcccagagtaggtacacacaagaactagtaaatacttgttacctccacactttggcatctctgtgaagtccacctggagatcttcaaagggggctgctccataagcttgtatgccagggggaacagctggaccttgtctcgcattatgctgtcggcaggtaacacaccgctgcgtcactgttttggcaagggctgacaaatgcgagatgtagaaataccagcctaacaacttttcaagtgattcctgacctagatgggtggttttatgcacagccagtacaactgcagctcctagcagctgtggcacagctactctcccatctggtaaccaaatccatccttcctccatcacttgtcctccctctgcctggagaaagtccttttcttctttagaataagtaggtacaagatcaggtgcttgagggagcaggggggctgtcactgatgcccggaagggggcagatgctgctttttgagcctctaagtcagtgcaggaattccccaaacccaccaaggtggaagctcactggtgtcctccgcaatgtataacagccaccttgtggggtttccatactgcttctaataattgcaagatttcttgttgatattttatgtcttttcccccagagttcaataggcccttttctttacataatgctccatgcacttgaagggttaaaaagacatatcaagagtcagtgtaaatgtttacagtcttaccttcactgagttctaaggcccgaattaaagcaatgagttcagctttctgagttgaagtgccctggggaaacgatctggcttcagcaacagtgtccagagttaccaccgcataccctgcacatctctcttcttgtgggttgacaaagctgctcccatccacgtatagttcccagtctactgatgcccagagtaaactgagtccaacacttctacacagtcatgctcgacagggatctctaatactgggagcaaggtagcggggttcagggtgttacaaacttcaatggttatatggggattttcacaaagcaaactttggtacttagtaagtctagcattcgttagccaatgatgtcctctagtattcattaaagtcaccacagcatgggggtcctttatgttcaggttttgcccaagaatcagcttatctgcttcttgtactagcagggcagttgctgccaaggccctcaaacacgggggccatcctttagaaaccccgtctagttgtttagagaggtaggccaccggcctcagccagggccccacagtttgggttaaaactccaactgccatcttttcactctctgacacatacaatgtaaaaggctttgtcagatcaggtagccccagggctgggactgacataagtctttcctttaactcatgaaaggcttgctgttgctgggatccccattcaaaaggttcctggtcccccgcctttgtgacctcatacaaaggcttagctaatactgcaaagtttgggatccacagtctgcaaaaacccacagcccctaagaattctctcacctgccttctggtcttaggctccggtagattacaaatgacctgctttctttctgatcccaggctgtgctccccctgttggatagtaaatcccaagtaacatacctgctgtcggcagatctgagctttttttcttggacaccttatacccacagtcctccaggtgccggagtagagcatctgttcccttggcgcacccgactgccgtggggtgtcccagcaaaaggtcatcaacgtactggagcaacacgcagcctaggtctctggtgggaaacttctggaggtctcgagccaacgcctccccaaagatggtgggggagttcttgaacctttggggaagctgggtccaagtgtattgagtagtgacacctgactctggatcttcccactgaaaggcaaacagcttctgtctctcaggggctaatctgatgctaaagaaagcatctttcaggtccaagcaggtgaaccagctgtcctcagctggcagcaaccccagcaatgtgtacaggttaggtactgttggatgtaaagtcactgtagcctgattaaccaagcgcaaatcctgtaccggcctgtagtccttggtcccaggcttgggaacaggcaggaggggagtgttccatggagactgacaaggaactataattctaaaggttcttaggcacttgagatggacctggataccttcaagagcttctctgaggaccgggtactgtttttgcctaaccggctggaccccaggcttaacttctataagcacgggggcttggttgactgccaaccctggagggttgtcttccgcccacactcttggccaccgcttagccagagctggtcttatctcttggcccggctcagttaagaaaagtctccattcctcctctcgggggagcataagggtcataatgactcctgttccgggtaactttagcagcaaagagccgtgctctgtaaaagagatagtggctctcagtttgctaagcaagtctcttcccaacaagggcaagggacaatcaggcatgtacaaaaactgatgaatcactttatgtcctcctatagtacaagtctggggcaagcagaaagcttgttttgctgaaactcccatggctccgatgatgtcaatagtctttttggataagggggcgactgaggcagttactaccgaatgttcagcactggtatctacaagaaaatcaatgtctttacccccaactgtcatcctgaccataggctctttggaggtccttgagcccagtccccctcagtccaataacccttctgccaggttgagcagggccccttcctccttgtctggagcctcctgctccgagtcaccttgttttccttttagctgagggcatttgttcttccaatatcctatttctttacgataagcacactgattacactgcaagctctgacagccaggctgagtttctttcccagggccccccttttcccttgcctctttggggggacccctctaattgctgcagctaacaggtcggcgtttcgccgggcctgacgttcattctctatgtggttttccttacggcttgctgcatccctgtttacaaacacctggttggctatttctaataactgtgatgtgttcatccctgcaaacccagcctttttctgcagttttcttctaatgtcttctgtgctttgactaactaaagccatgttaatcatgcgttgattttcagggctatcgggatcaaagggagtatacatacaataagcctcacacagtctctcgtagaattttgctggactttcttcttttccctgaatgacctcagagaccttgttaatgtttgtggccttctgggctctcctctttaatccttctaagagagctttcctgtatcggtttagcctttgcatatcctctctttaatttgggtcccactgggggtcggttcctggtaactgtgtccttacatactcttgggggttttggtaatcagccagtgcatgttcctctagccacttagttgctgcttgaagcacccttcacctttcatctgttttaaagaggaacatgagcaactggtggcaatcagcccaagtggggttatgggtctggataatagtttggagcaaatcaattagagcttgcggcttttcagtataggacggggtattgtttttccagttgagaaggtcggcagaggtgaagggctggtacacaaaaacacgactctccaccatgtgcccatcctcatctattccagtatactgctgctctctcaggggcatttgtatccctgttttgggtcttaaatgagctgccaagggaggggtttctcccgaggcttcacctcctctcttgtctactctgagtggcctagggatacatttgtctggcagaggcgcaagcactgtggactcaaaagtggggagcctctctccctgataaggggagggcaacactgggatcactggtgccatctcctgcaatggatcttctgatgtttggtcgaacagaacttcaggagttgatttccctcagcgggtggagcagaatccttccttgactatctgtccctttgctactagcactgctgctgcctgccctcttagccactgtggggggtctagcaccagctgtaaccaagtgtctatgtatggaaactggtctgagtgtcctgacttactagttaccttgtgccataccttagaaacaagggacctgtccaggcttccttctgatggccaacccacttctaatgttggccaatctatttcacacaaagttctaagtttccctggtgtcatagtaaccccatagtctccattaaatcccttcttaaaatttttcaacatagttcctagaggagtaggcttattttgtgtctgatccatgtttcctcaagacaaaacaccaagctcacaccacatgcacaccacaaaacaaagaatgggtaaaaagtgcacacacacactttttcagttttcaccaaaccagaatcaaaaccaaaatcagagtatccagaaatccaagccaggtcaaaccaaaaccaaagtatcaagcaattcaagtcaagtcaaaaacaaaaaccaaagtgccagtacaggcatgccgtggttgatcaggccacgcttccactcaaatggagtgggcaagttccgaagaccagtcttaccaagtttcaaatgtctggactccaagtgcctgttccttcccagtgttcagccactgcattgatcctccacaggggcctgccacgcactgctctgacgaggctttccaccggggtaattgcctacctgggagcgctctcaggatccgcgtcactcaagctggccagagtcccctgcagggatgctccacagggcaggcctaagccacctaaggggctgcctcgactgtccttcaattaccttgcttcctggccagggaaccaagaaatgtagcaggacgagtcacagacaaaactcctcagacaccagattaaagaaggaagaggttttttatttggccgggagcattggcagactcgtatcttaagagccgagctccccaaaaaagaaattcctagcccttttaagggcttacaactctaaggggtctacatgaaaaagtcataataggtcaagtaagcgtgagaaacatgactgggggctacctacatcagctaacagaataaaaagttttacagtactttctcatacaatatctggaatttacagataacaccaacagttttggtcaggggttaataatattatattttagccaccagggccaggtggtggtgccaaggtcatctagctatttatcttacttctgtttcttttcaactttttgctttctcccttttctcctgtcttataaactggggaaaaggggaggttggggaggaactgagaaggacaacaggagaagtggtgacctcataccatatttcgatggctgtgtcaaacagtttaaagttatttgagaaatcttcacactgctctttccacagtggctgaactaacttacactccctttgctctgcatcctcaccaatacaatactgtggtttttatttgcatttctctaataattagcaacgtttacatttttttaatgtgctcttttgctgtgtgtatgtcttcttttgagaagtgtctggtttttgtttttgttttgagatggagtcttgttctgtcacccaaactagcgtgcagtggcaggatctcagcttactgcaacctctacctcctgggcttaagcaattctcctgcctcagtctcccaagtagctggattacaggcgcccaccactgtgcctggctaatttttgtatttttagtagagatggagtttcaccatgttggccaggctggtctcaaactcctgacctcatgatccacctacctcggcctcccaaagtgctaggattacaggcatgagccactgtgcctggctgagaagtgtctatgtctttgctcattctttgattggattgtttatattttgcttgttgatttatttatgattctttatagattctggatattagatctttttcagatgcatagtttgcaaatattttctctcattctgcaggttgtctgtttactttattgatagtttctttcactgtgtagaagctcttaagtttaattaggtcctgcttgtcagtttctgtatttgttgcaattgctttgggagtcatcatcatgaaatctttgtcaagacctatgtgcggaatggtatttcctaggttttcttcaagggattttacagttttagattttatatttaagtctccaatcaatgttaggttgattttgtacatggcgagagagagaggtccagtttcaaacttctgcatatggctagtccattatctcagcaccatttattgaataagaagttctttccccattgattgttattgtcaactttgtcaaagatcagatagttataaatgggtggttttatatctgggttctctaacctggtccattggtctctgtgtctgatttcttacccgtaccacgttatttagattattgcagcctgtaatgtagtttgaagttgggaagtgtgatgcctccaggtttgttctttctgcttaagattatttcagctatttagactctgttgattttatgtaaattttagaatgaattctggggataatattatttgtagtttgataggaatagccttgaatctgtacattattttggacagtatagcctttttaacaatattgattctttttattcatgagcatggaatgttttccattactttgtgctttctctgatttctttcagcattgttttgtgattctaattgcagagatctttcatccccctgacataattttatttgatattttgcattcacaaatactaattttctctatataattatgataattcagtttctctatgcaatattttacaaattttacattctactcatgtttcccttttcttttctctttttttctttgagatggagtctagccctggtgccaggctagagtgccattctcctgcctcagcctcctgagtagctgggactacaggcatgcaccaccatgcccagctaatttttgtatttttagtagagacggggtttcaccatgttggccaaaattgtctcaatctcttgaccccgtgatctgcctacctcagcctcccaaagtgctgggattacaggccatggtgcctggcctcaagcctcttttcttaataggcattccattatgtgctccttcttggttaagttgaaaaaggcttctgttttaattccaagaggaaaccatttttgcatttgataaattccacttattttaagatgatgctaaatcagaacgtttatattctccttgaatctttgaatcattatagataatatttgccaataaattatgcaatcctatttaaattttaaattttcatattgcaatattaaataaatacgtacaaacattctttaaacaactaacaagagatacaaaaatgtttttaaaatatgtggattttttaaaaaatatatctgatgttgagacagcatgatagttaaaagcatcttcaactcctgaaactgcctcctacaaggaggtgattttagaaatgtcatttatcctattttcatctaagccctcttcataggtaaaatcagaataataaaccacttcatagagttgttgtaaaaattgtatgtaacacattaatataacacattaatatagtagttttataatgctatatctataaggttatcacactatatatagttataataataaagaaaagccaatggcattttcatattaaaggtttttccaagaaaagccagtgagatctttcatattaaagttttatatttgattcaagtgtatttcaatgaaataatataggtgaaaattaaattactaaaatagaaaatgcctgacaacatgtgagctagatatcaaccactggaatttattttgaaaagcacaagcctaatgcaaataatttataaatatatatatgtgtgtttatgtgtgtgtgtgtgtatatatacacatatatatatagagagagaatagaaaaaatcttagtgaaagaaaagtggaatttaaaaacaaagttttaagttggaaacaatggtatgtgaacaatagcccatttcagttgccacaataaaacagaccttatgtgtcaatgcaggatattctcactctgaatgaaaatattagtaattggaaaataatgaaaggcctccaggaatttggaaataggaatgatcttcttttctcagacaacagttggattattgaggaattttttttttgccactttgttataccgggtggatattaaagtccacagatttgattctcaagcacctggctatagccaacatcttggtcatattctccaaagcagcttcacagacaatgacttcttttaatttcaagcatttcctcagtgatattgcatgcaaacatgttttctatgttcacagagtgggcagaggtgtgtgctttgccaccacctccctcttgagtatcttccagccatcattgtcagccccatgaactccaggtgggcacagttgaaactacaaacccccaaatatattgggtcccccaacatcttgtcctggattggaaatacactgataaataccattttttctatgcatgtgattggcaaatcgaacagcaaaaacaattcaaagaaaaaagatttaagatactgttcttcattagataataacagaattaccagcttactgtgcacaacattatcatattgcatggtgtttgtgtgttagatacagttaggttcactcttcaaatagcttatccagtttccccattctctattctataattccaagtattccttacctcaactgtgcaccaacttacctaactatgcctagacatgaatgaaattgttgcaacccaagtcccagtctgcattattttcctttttagagaataggttgctttcctagttcccacataatggaccccattctctctctcttaactcccttatgtgactaacttatctaaaaaatttgaagtatttagccagttgggactagttgagactgtgcggtccaaccctaaccgatagaggaaagacacagaagtagaagctgcattagagataatagaaactcgcacttcctttgttttgtgtgcccttgccattgcttaatttacgaggtgcacccttttatagaagtaaatttgccttgctgagtgctatttcttgtggagcaccgaaaatctgtttgtaacatgtgtttgagactcataatctggaccagtggctccaagatttttattctgtacaagtggccaatgagcacatgaaaagatgcacaacatctttattcactagaaagatgtaagtcaaaaccacagtgatatatcacttcatacctatgggtacaggtatatttcagaagacagatcagtgtgggtgaagatgtggaaaaattgaaaccctcatagagtgcaaaattaggcagcagttttggaaaacactttggcagttcttcctgaggttaacatagagttactacatgtcttagcaattccacttctgagtatatactcaactgaaatcaaaataggtccacacaaaaacatgtatatgcgtgtccatagaaacattatttgttatggccaaaaggtgagagcagtgcaaatagtccatggaggactagatagacaaatgtgatgtagtatacaaggcaatagtattccgccagaaaaaggaatgatgtgccaatatgggacacaacatggatacatattaaagacattatgcttgatggaaaaagctatccaaaaagggtcatgtactttatgaatccatttgtataaaattcccaaaataggcaaatcctttgaaacagaaagtggattaatggttgccagaggctgctagggaaaatagaaagtggctgaatgatgggtgtggagatttttttttgttaattatacagttctaaaattacacagtggtaatgattgtaaagcattgcaaatacacaaaaagatactgaagtgtaaacctgaaaataattaatatattgaatttgatgttatgtgaattttatctcgataaacataattttataaacaaacttcaagccactgttgccaatgataaagactagataatatgctctaaatgcagcagaaaaacactgaaacactaagttagctgaaaggaaaattgaaactaaaatgaaaacagagtccacaaagttctactgaagctttagtcacctagatattcaaataaaaacacccaggttcaactgtgtaaccctctgtcatagaagtctgggtgcttttggtagataaatccattgggcatatcagtgtgacataaaaagtgcttaaaacgtagtttttttaaaaaattataaattcgtgacactcataaagataggaacacatattaaaatatttatttaacatctgaggaatcagccgatatgataaccagtgcaaaaaagagtcaaatggccaggctcacacctgtaatcacaaaactttcagaggcccaagtgggcagatcacgagatcaggagttcaagaccaccctgaccaatatggtgaaacctggtctctactaaaattacaaaaattagctgagcatggtggctgtaatcccagctactcaggagactgagcctgtaatcccagctactcacgcctgtaatcccagctactcaggagactgagccaggagaatctcttgaagtcaggatgcagaggttggactgagctgaactcatgccacgtcactccagcctgggcgacagagtgacactctgtctaaaaacaaaacaaacaaacaaagcaaaaaaatagccaggcacggtggctcatgcctgtaatgtcagcactttgtgaggccgaggccggtggattacctgaggttcagagttcaagaccagcctacccagctacttaggcggctgaggcaggagaatcatttggacctgggaggcggatgttgtggtgagccgagatcgtgcaattgcactccagcctgggcaacaagagcaaaactcggtctcaaaaaaaaaaaaaaaaaaaaaaaagaggccaggagcggtggctcatgcctctaatccaaacacttgggaggctgaggcgggcagatcaccaggtcaggatatcaagaccagcctggccaacatggtgaaaccccatctatactgaaaatacaaaaacattagctgggcgtggctgcgcacgcctgtagtcccagctgctcgagaggcttaggcgggagaattggtagaacctggcaggtggagcgtgcagtgagccaagatagcgccactgcactccagcctgggtgacagagagagacttcttctcaaaaaaaaaaaaaaagaaaaaaaatgcagattcaccttcttagcaagagcagagctgcagttctccatgatatgtttggacacctcttgtgggagatctgctgtgcccagtgcctggactcttccatgcttatgtttcttgctgccactcttgagtacctgatgccccatatcctggagctggtgaccaatgaagctcataatagccacagaaggtacagttatattatcatctatattacatatgattatctatgtgtgtattatatatatacatatattctatatattatataaaatgtatatatatgttttggacaaagacatattcaaacaatagttaatagtttttaaatattcagaatcaaaattatttataaatatattttattacaaacacaattattcatcttattcttagccaaaacacctgatctgtctaataagcacatatttcacagagctacatagagttatcaatggctaaatacattttatagggaaaagtatactctatagaaattctgccttaattgaagaactcaaagccccaaatgttataaacacttttatggctgcattaagttaaaaataagtgttccatcaagtgttgggtcaatctaactcctttctcctgagtatcaacatttgaagttttcacctattcaccaaagactcaaaggccaccctctggtatctctggccttttcatagacagatggtaagaagctgcccagctcatttcaagttcaaggtcagatggtttcttctagaagttccagtttactgtgtaccagccatgtgattctgtatattcatttattctctctaagcagccgtctccatctgtgtaaaatcaggatgatgaatttctctatctttgggttatcccaaataagaagtcaatttgagcttaagtttaagcttaatgcaatgcttggcaccacaaggcatgacacaggatgctaaactgggcacctgtattttacaaaactagaaaactttgagtttcttccctctcctgcattttcacatgtatttggtttaatctctaaatctgttgaagttgaatagatgtgtagacagggattgagattaataatctcatttacaaaaacataaaaaagaatgaaatacgtagaaataaatttattgaaagaggtaaaagatctatacactaaaaactctaaaacattaaataaattgaaggaactaaaaaattgaaagatacaccatgcttatgaattgaaagaattaatattgtaaaaatgtccatactacccaaagtgatctacagattaaatgcaatccttataaaaattccaattatatttttctcagaatttaaaaagtaattatcaaatctctatcaattcatgaaagacccagaatagcctaagcaatattgaggaaaaacaacaaagctggaggcatcatactacctggtttctgaatatattacaaagctacagtaaggccaggtgcagtggctcacacctgtgatcccagcactttgggaggccaaggtgggttgcttgagtccaggagttctagaccagccttggcaccatagcaaaacaccatctctacaaaaaatagaaaaattagcagagtttaatggcacaaacccatagtctcagctacttgagatgcggaggtgagaggattcctagatcctgtgaagttgaggctgcagtgagccacgatgaagcaactgcactccaccctgggcaacagactgaaacctgtctcaaaaaaaagctacagtaagcaaatagcatggtactggataaaaataaacacacacaaatgaagcataataccaagtcaagaaataaatgtatctacttcatttctggtaatgaaggaacaatgttttcaccagcaggcttcacctttcagtgttctatcaatgaatatttatcggtagattatttttaatctaacttcaagcattctgtagcaggccagatgagggcagatcagatgaatgttaacatgaaaattttgtggatttatagttaatgagtaatcatttatgaaagacttaccctatatttctgcagttgaattatttgcagttggtctagtggtgagcacagtcaataagaaacagataaataaataaataaatgtataataagaaactaaatcagtagcctgaagaaaaagtagagttctatttgaaacaataaagaaagagagagaatgcttactgatcttttttttaaaatctgtgatggtcaatcaatatttctctctcagaaggcaaaaaaaaaaaaaaaaggtagccaggagacaggattaatttgtatctcctgcttggatggacagaacagcatgtggagactctcatcatgaacttttactccaagaactaccataggaacataccaggaaaaccaaaagaatgcacagactctttgaaagaagtggcttgccactgcaacctctgcgagacaactgaaaaacagcaagtgccaaaagtgtaagagaaggaacattcacctctaaacacacatactcaaaacctgaaaatccagattaccagagaaggatttagccttacctagggccgaaatgaatttagagagccaagcaaaatataaaagcagaagcagtgggaagagccccataggcactcttgatcctcagggaagccatttctgactttatctcacaggggtccttgggaagggctgccagtggaattggggaagggctacagggagaagaaaacttccagctaaaccctgtaagaattttgacctagtgtcaatgttccttggcagaatcgatgaggggacagtgaatgagaagcacagatacgggcacaaaagccatggcaggtggtgaggggtggcgcctgaaagcccaggttgctttctcaatggggaggcttatagcctggggcaagatctcagtactgctcacggactggatataaacttggtgctgtttgtggggtagggtgtgaatgaaactggccttgctggcttcatgggagctgagtgaggcctgtcactgctggctttccttcacttccatcctgacctgtatgatacagcagaggcagccataatccccctgggaacataactccattggcctgagatccatactcccaaccccacagcagctgcagcaagccccacccaaggagggtctgagctcagacaggtctaaccttgtcctcgcctgatgcccttactctacccatgctggtagctgaagacaaaaaacatactctcttgggagctctatgttcccacccattgcctgagaaacctgaatacttatccaggtgacccaatggcaagcttgcctacaccctatactaccacaactgatgccgtattgaaaatcccacctctaggttggaggccaaccaactcaagccattacatcaactcatcaaagaaccccaaccaggtggtgtggctcacacctgtaatcccagcattttgggaggctgagatgggtggatcacctgaggtcaggagttccagacccccctgaccaacatagagaaaccacatccagtttctactaaaaatacaaaattagacaggcttggtggtgcatgcctgtaatcccagctacctgggaggctgaggcaggagaatcccttgaacctgggaggcagagattgcggggagccaagatcgcatgattgcactccagcctgggcaacaagagcataactccatctcaaaaaaaaaaaaaaaaaaaaagaacaacctcactccaataaaggagaaaacaacagctaattccatcacctgtaacatcctggctaaccagaagtcctcagtctttcatgtgacaacttcactgctagaacaaccagcatccaaaaaaagaaaaaaaaaaaccagtgcactaaacagaactacaaccaaccaccctcacagagtccactttactcccctgctacctctaccagagcaggtggtagaatccatggctgagaaacctgaagacagatcacatcacaggactctttgcagacactccccagtaccagcccagagcccagtagctccactgggtggttaaacccagaagatcaataacaattcctggctctcaggaagccccatcccaagggaaaaggggagactatcatgtcaagggatcaccccatgaaacaaaataatctgaacagcagcctagagcctcagctctttcctctgacatagaaaacccaaatgagaaggaaccaaaaaaacaattttggtaacataacaaaggaaaaattttttaacaccttggaaagaccacactagctccctagcaatggatgcaaaccaagaagaaatctctgaattgcagaaaaaagaattcataaggtccattattaagccacttaaagaggcactggagaaagataaatactaactgaaagaattttttttttaaaatacaggatatgggtgaaaaaaattaccagagaaatagatagcataaataaaaaaaaatcacaacttctggaaatgaaaggcacacttagagaaatgcaaaacatagtagaaaattacaaaaatagatccaaacaagtaaaagaaagaacttcagagctcaaagacaaggcttttgaattaacccaatctaatgaagacaaaaaagaatttaaaaaatgaaccaaacctccaagaagcttggaattatgtaaaaaaccaaacctaagaataattggtgtccccagggaagaagtgaaatctaaaagtttggaaaacttatttgaggaaataactgagaaaaactttcctggccttactagagatctagacatccaaatacaagaagttcaaagaactccaaggaaattcatcacaagaagatcatcacctaggcacacagtcatcaggttatctgaagtcaatatacaggaaagatttttaagagctgtgagaaaaaagcatcaggtaacctataaagaaaaacatatcagattaccagcagatttctcaacagaatccctacaagctagaagggattggggtcctatgtttagcctccttaaacaagacaagcatcagcccaaattttgtattcagtgaaaataagcttcataaatgaagaaagatacggtcttttccagacaaacaaatgcttagagaattcaccactaccaagccaccactgtaagaactgctaaaaagtgttctaaatcttgaaacaaaacctcaaaatacactgaaatagaacctccttaaggcataaatctcacaaggcctataaaacaataacacaatataagaggtattcaggaaactactggcacaatgaatagaacagtccttcacacctcaatactaatgttgaatgtaaatggcctaaatgctccacttaaaacatacacaatagcagaatagataagagtttaccaataaaatatctgctgtcttccagagactcacccaacacataaggactaacataaacttaaggtaaaggattggaaaaagatattccatgtaaacgtaccctgataccctgaaagcaagcagtagtagccattcttacatcagacaaacaagctttaaagcaaaaacaggtaaaaaataaaaaacacaaagagggacattatataatgataaaaaaggactagtccaataggaaaatatcataatcctaaatatatatgcacctaacattggagctcccaaattcatgaaacaattactactagatctaagaaaagggataaatggcaacacaataataatggggaacttcaatactctactgacagcactagacaagtcatcaagacaaagtcaacaataacaacaaaaaagggaatggacttaaactataacctagaacaaatggacttgacaaatatttacagaacattccacacaacaactgcagaatatacattttattcatcagcacatggaacattctccaagatagacacatgataggtcacaaaacaagtcgcaataaatttaagacaatcaaaattatatcaactactctctcagactgcagtggaataaaattcaaaatcaactctaaatgaaccatcaaaacaatgcaaatacatggaaattaaataaattgtagaaattaaataaatacatggaaattaaataaataattaaatttaagatcaacctggttctgaatgatctttggatgaaatcaagatttaaatttaaaaattctttgaactgaacaataataatggcacaacctatcaaaacgtctgggatacagcagaagtggtgctgaaaggaaagttcatagcatcaagttcttccatcaaaaagtctgaaagagcataggttgacaatgtaagataacacctcaaggaactagaggcacaagaacaagccaagcccaaacccagcagtagaaaagaaatatcaaagatcagagcagaactaaatgaaactgaaacaacaacaacaacgaaaatccaaatgataaatgaaatgaaaagctggctcttagaaaagataaacaaaattgatagaccattaacagcattaaccaagaagagagaagatccaaataagctcaattagaaatgaaacagaagatattgcaaccgctgccacagaaatacaaaagatcatttagggatactgtgaacacctttatgtgcacaaattagaaaatgtaaaggagatgaataaattcctgcaaatgtacaatcctcctagattaaaaaaaaaacaactctgaacagactaataacaagaagcaagattgaaataataatttaaaaaattgccaaccaaaaaaaaaatgttcagaaccaggtggattcacagctgaattctactagcctttcaaagaaaaattggtgggggtaagggaggagaccacccctcatattgtcttatgcccaatttctgcctccaaagaaagaaaaagtaaaaactaaaaggcagaaatgaaatccacaagcagacagcccagcgccacaccctgggcctggtagttaaagatcgacccctgacctaattggttatgttatccatacattacagacattgtatagaaaagcactgtgaaaatccctatcctgttatgttccattctaattaccagtgtatgcagcccccagtcatgtaccccctgcttgctcaatcgatcatgaccctctcacgcagacccccttagagttgtgagcccttaaaagggactagaattgctcactcggggagctcagctcttgagacaggagtcttaccgatgtccccagccgaataaaccccttccttctttaatttggtgtctgaggagttttgtctgtggctcatcctgctacaggggcagggccaagatggctgattagaagcggcatcccatagaaaagaaccataacagtgtgtgaatgctgtaccataacctgaggtatccatgttctttcatcagaactgactaggtggctggcgtgatccatggagaggaaggaagagcagtgtggtgtggcagcccacctgacacccacatgggcctggggagcccccaccccacagccaagggatgcagtgagtgagcatgctacccagcctgggaaactgctttttccatggaactatgcaacccacggattagaagattccactcatgaacccacaccactggaacctaaggtcccaactgttggaagcaagagctcagagtcgcaaagaacatgggcactgaaacaaggaatttctcagcaaggcaaggcacatttacttctgcagaagggtgccagtcatgtctctggctgttttgagagcacagcatacaagagagggaaggagtttttatccctaacacagtccctacttctgtgtgctgcccccattggctggagtcagaccacacaatctaagctaactcgatggctattttaaatcgagactggcaggaaggttgtttacagagcaggtaactaggagtgaggaggacttcttccaaataaggaagagatgtgggttacggattgcgactggggagaagagatgtttacagagcaggtagctaggagcgggaaggtataaggaagttgattttgagaacaaacaacaaggaagttaccctttgaagaggaacttattatgcctgacacaaccctggagctgagcagattatgaacagcctgtcaggtagaatctgcttaagcctgccgagttcccacggtgggggagaccagcaccaccgttgcagttggctgctgtctaagctgtttgagctccttgagggagggacagcagccagcactgggactcgaaactgcctaacaggctaagatccctggatggggaaagggaagcagccatctctatagctcctggcctcacttttcctctgctagatccaggaaaactggacagcttggtctcaagaggtgtcccccacagcccaacacatgggctgtggcagactgtggccagaatgtctcttcaggcctgacgctgacccatctctcctcactggtcagggcctccctgcaggaactccaacatctccagccaggggctcagggacataactctgatctccctgggcctgagcccctagggggaggggtggctgcagtctctgtggaccagcagacttagcctttcctcctgctagttctgaggaatttgagcagcccagatgagtgggtttccccccagcaaaacacccccctccaccaaggaacagtcaaagtgcttcattaaatgggttctgctccccatgccacccaactggtgacacttcaacaggggttgtcagacaccctatacaggagccatcttaatggcatcaggttggtgcctcttgagatcagagatcacagaggaaggagcagactctgcttttctccaacctccttgagtgacatctccaggcatgggagtgaaccagattaatagggcctgaagtgaacccccctcaaactgcagaagccctacagaagatgtacctgaccattgaaagaaaaacaaacaaacagaaaggaacaacagcatcaacaacaaaaaagtacccacaaaaacctcatccaaggccaggcatggtggctcacacctgtaaaaaggttaacgtgtttttgtgattggctattgtttttcagtaactaacgtataggaatagattgaaacagaaatttctctgaaacagcgccggatgaatgcctaaaggggctcacacaacctgctctgagacttggtgaccattatttttgtccacgttcaattgagttcaaatttaatatttaacttttccagtacattcggcctcaattggatattcaattgtattaaaatacccttacggatacatcgggaaggcatagttgatatatattacagatacagggtaagcacaggagaattaaaggcacaattaataaaaattaaaccccacatggcgttgcaagcagagtaatattgtgagacttgccaggaatatacacacaacatttagtatgcagtaaggcgcaaacccctccttgggctgtggtaagcatatctaatgccatttgattttgcaacacaacaatacgcagctgagcaaattcatctgataacaacataagcccagtgctactatcattaagagctttttctacatgtaagctaaatattataatttgttggtgaagcaagattgtaccagtggcaggggagaatactgtgatagggtaccaccaccagggagtccagcacatttgtaaccagcgatgtttgtaagcatctagattactggggaggggaatattatcctggatggtgaatagaattaatggtcacccccaagtgcatctccccatccaaagtgggggcagtatcaccaccgataggatctgcatacccagagggccccccaggggacagcaatggagctactgtaatcatagtgtactaatctcttattaaaataggaaagagattgttgttcattgggtgcaatgttgttgatttggagtatgtgttgacaattgagtggagaaaccccagagtaacattagaggagccatttaaggcctctagacaaagcaggggctatatggaatccagccaccagcacagaaggttcgtagtatataccattccaggaacattgggcagaataccaaggctttcaatgcaaggtgagggtggagttcatcttttgtctgacttggcaaagattgattttttagtgtggtcaaatgaagtccaggttggattgcaagtgctgttgttgcagccccattggtaacaacatagccattcagaaatgttgtcagggatgattctccaaggtagaccatttttggcggcctctagcaactccacgtatagccaacattgattgcagttggcttctgttgcagcagtggctaaaaagttgatgaatttattcttggcctcagacacaaagacacaggtgctgaccattagtagataggttattccctgtaataacaaaaacagaggggaacatcatattgtttttcatctttaggaaattgtactatgccttcattttctgctttcatagctacaaggtcaccagccttagggttgggatctgatggacgctgtacccatattttggctccaggatttaagcttcctgtaccaggggatctgaatccccaagttctgtatgtagcctctgttgggcaaagatttcctcaggggttaattgtggacaaggtaccactaacaattgagcaaccagcatctgtggttttatagcaaaagaatctggagaggtattgtataaaatgtcctttaactctccccggtaatcactatcaattattccaccatacattattatgcttctcattgcaaggcttgaacatgttgtaatccatttacccacattcaagatcacagttatggtggaaatttttgcctgttgatcttcctgctgattaaatagtctgtcaagaggaagcagagacacactagcatcaacatggaaaacagggccaggcacagtgactcacacctgtaatcccagcattttgggaggctgaggtgggcagatcacaaggtcaagagattgggaccatcctggccaacatggcaaaaccccgtctctaaaattacaaaaataaactgagcatggtggctcatacctctaatcccagcactttgggaggccaaggcctgctgatcaggaggtcaagagatggagaccatcctgtttaacatggtgaaacctcatctctactaaaaatacaaaaattagctgggtatggtggtgtgtgcctgtagtcccagctactcgggaggctgaggcaggagaattgcttgaacctgggacatgaaggttgtggtgaacccagattgtgccactgcactccagcctaatgaaagagtgagactgcatctaaaaaatgaataaataaaaaataatacaaaattagctgggcgtggcagcctgtgcctgtaatccaagctacttgggaggcagaggccagaagaatcacttgaaccgtggagatggaggtggcagtgagctgagattgcaccactgcacttcaatttggtgacagggctggattccatctcaaaaacaaaaaacaacaacaaaaaaacatggaacacagtgacgatgggagtatgcaccaggattcagataccttaccaatattgttttccccaaacctctttattccgcattaaccatttgtttcattgccacttgggcacccaggtagtaagaccatttgctactgacaaagagttgatataaaagtaacaaatccctctggcctcctcctgaatagctcggagaaacgactactagttcagctaactggctgctcccaccccttccttcatcagaaatgcttatgtttttaacaggattataagccacagccctccagcattgggtcccaccaaagtatttggtggatccatcagtaaaccaagcatgtttctgatcctctgggcttagttctttaaaggatttgccccatttgatgtgtgtgtgtggggggtgtttctttccctatctgcaggacttgcttggttgtttcctgagctcgcaggttttccacatcctcatgtaaaagtgatagcccctatgattttggcttagcctggttttgtatgtcccatttccattttatgatgctactttctgggcatgccctatctggtgggttttgggggaactcatgaccaaagtcataatagaaatttcaggcctcataaagacatcgtggttgaagcagaggtgttccatttccagcaaagctcaatagcaagctaacaattgcttctcaaaagaggaataagcttttccagcctctggcagtttctgggtccaaaacatgaaaagtaccctctttccatcttgtttctgcctaaggctccaattagcatgttgatctacgacagttactcgcagttcatcaggcccatcccatataggccatagatccagggccagttgcactgcttgtttagcttgttcaaaagccatgctgtctttctctccacagtgagagtcatacctttttctagtggctgcattcagatgttgtaaaatgttacccaagtaaggaatatgatgtgttcagaatccaaacaagtcaatacatttctgggcctccttcttagtggtaggggttgcaaattatagtattttagccttagcctttggtgaagtggactgtttctttgcattccataggatgccaaagaattttacactttgtgcggatccttaattttactaggcttaatttcccatttttgagataggaactgggtttttacatgctctaagccccggctgactagttcttcagttttaccctgattgggccacctggacagctgcttttttcagcaataggctgatagctttgagcctgatcagtcaagacattgactggcattgggccagggccagtccggaagtcagattagcattttccttttccagcttatatttctcttgtagcaaccagcccctatcttgacacattaacttataagcagcaatcaaacactatccactttgtgagattccctcagcatctcctttggtgactggaatcccctgcagcacttcacgcacagtcaaaggtttaaattgcactaatttagattcccaattcccacaaaggccagttcccctgaaccattcaatcacaaagaaggagaactgggagtgatcccatctcaggatatgggaaatccttgagcctccagccctatccttctggtcaaaaaggggcccacttttgttttcaaatcctgtttgtgatgccaaaaatgttctgtatgggaaacgtgggagaggagaagaaaagacatacatacaataactttaatggtaaacaagctttaacccacatcaatatcaatgcagacagaataaactaatgatataataagcaaatgatataataagcaaataaatataatacacagattgatataataagcaaattgcagtaagaagaggagatgggaaaagatatatatatatatttaccctcactagactatggaggattaccaactgagtaggaagaaacagcccaggctccagagtcggccacccattcatgcacagacaaggagtctcatgaagcttcagggtggtctgggaccctagctcttttgtaacgagttgtttggcataaggcccagtgaggagggccatttgggacttgcctcacggaacacaaaagggtcaagttgtttttgtgattgtctattgtttttcaacaactaatgtatagtaatagaatgaaatagacatttctttgatacagctctggatgaacacctcaggggctcacaaccaggacctgttctgggacttggtgaccattgtgtccacgttcaattgagttcaaatttaacatttaacttttcctccataaattctcctgtcttcatgaattggctctgtctaggcaaagggcaaaatgaaccccttgggctgttacataacctccacctcctgggttcaagtgattctcctgcctcagcctccggagtagctgggaccacagatgtgcaccaccatacccagctaattttttacattgtgagtagagatggggtttcaccatgttggccaggctagtcttgaactcctgacctcaagtgatccacccaccttggcctcccaaagtgttgggattactggcatgagctacctgtgcctgaccctaaattatttctatctcttatagcagtttgaaattacttaaaggttgtttcaagttgaaaaaataagaagaatgtggataaaaataaaatataaatagataaaaaaattacagggattacaaaatatatatgtaaatctggagtggtcaaaaatgacaaatttgatttatttataaggttttattaaaattagctttaatcgttaatacactattaccaaagtaaaagctgattttctcttgaacaaaaattttatgtattattaatatgacagcaaaatacttctgttcacctttgaatacattcaacaagacagagagtaaaaaagagataaaatgttcccatgctctggcatggaccaggctcagctctgggaggaagccctgcctgaaaaggctgcagcttaggctgtcactcttttcttcactccgcccagcagctgatcacatcttctgtcactcagtgtctgagggggcgggaccttaagcattagccaatcagaggcgctgggctggaaaccgtccaatcaggcacgcagctggaatgaacaggacggcttccggatttggcggggtctttgtctctccctgcagctggagctccaggtcgtctgttcactgctctctgtcttcttctcctagaggcccagcctctgtggccctgtgtcctgcaggtattgggagatccacagctaagacgccaggaccccctggaagcctagaaatggtgagagtgccggtccagcatcccgagagaggtgaagtgtctgtggcgggactcaggcctcccctcagtcagctccacaatctgcaccccgaattctccttacccagctctgcctcagtcccattcagccataagatggcggctacgctgacagcctggcccccgggcgtcctgtcgcttccccgcgcagtgactgtgcccctggcctggagcgctctgtgggcagctctgcacccgcagtgccgtgtctctcccagattgtgcagggaccaccggagggtcttcaggggagaatgctgactcgcggtgcgggttcatgaatgggaagagctttggtctgtggggttcacagtttctcttttctgctattaaaattgtatggggccgggcgcggtcgttcaagcctgtaatccccgcacgttgggaggccgaggcgggcggatcacttgaggtcaggagttgaagaccagactgaccaaaatggggaaaccccttgtctactaaaaatacaaaaattaggtggatatgttggcgaatgtctgtagtcccagcttctcgggaggcagaagtgagagaatcgcttgaacccgggaggcggaggttgcagtgagctgaaatcctgccactgcactccagcctgggcgacagagcaagactcttgtctaaaaaaaaaaaaaaaaaaaaaaaattatgggagtcactgcaaaaatatcaaacaatttaatcaaagagtgattcaagaattgtagagcacccagctatagtttgtagtttgtggtccatgggagaggcttgaagaaaagacatttataaaatgcatgatgaggaaaaccaaattcaataatttgttaggtttagtaatgtagtttcttaatttgtacaatcaaggtggaaatttcctggttatgtaattagagcttaattggcagtttatagttgctgaagcctgaattttgtttcccctaatgtagtaatttgccaaaaaatgcacttgagcttagatttttttttttttttttttttagaaatagaaatccggggactagagcctcttcagtctaattgcctgccacttaattattttcacatcccacaggggactgactttccctggcatttttcacatgtgtcccaagcagggcctcaagtgtcccccatgttcctcaattaattattattattattattattttttgagacggagtcttgctctgtcgccaggctagagtgcagtgtcagatcttggctcactgcaacctccacctcatgggttcaagcgattctcctgcttcagcctctccagtagttgggactacaggcaagcgccaccactcccagctagttttcatatttttagtagagatgaggtttcaccatgtttgccaggaatgctagttaccaaggaaaaatatagggaaaatctctcttccattttggctgtagacaatgaatatatttccacaggaaaatgtggtagataattgaggagttacatggattcatcaacacattagttcctctttttgcagggtaaattttttctatatccttttattttgatttctgagttaaatgctaaattttaagtgatgaaacatggtaccttctagaagtgttcccatatgactaattttttactacattattttatttatttacttatttttttgaaacagagtctcactccgtcaccaggttggagtgcagtggcgtgatctcggctcacgcaacctctgcctcccaggttcaagcagttctcctgcctcagcctcccaagtagctgggattacaggtgtgtgtcaccacgtccagccaatttttttgtgtttttagtagagacagggtttcaccatgttggccaaaatgttctcaatcttctgacctcgtgatctacccaccttggccttccaaagtgttgggattagaggcgtgagccacagtgcccggcctactgcattatttttaagataaataataaaataatacatacattgtctgaaagaagtagatatatatgcttttcttataggggtataaaatgcaagcatcttagccaggtgcagtggctcatgcctgtagtttcagcactttgggaggcctagacaggttgattacttgaggtcaggaatttgagaccagcctgcccaacatggtgaaactcatctctactaaaaatacaaaagttagccaggtgtggtggcatatgcctgtattcccagctacttgggaggctgaggaacaagaatgtcttgaacccgggaggtggaggttgcagtgagccgagatcatgccactgaactccagcctgggccacagagtgagacttcgtctcaaaaaaaaaaaaaaaaaagtaagaaccttaaaatttccttcccttatgtaaacactgcgtttgagtaatttccctggatttttcaaacacatagtttcaaaaactaagtgagtaattctgacatggaaattaaagcttgaacctagtgactccaagctaaggctaataattaagcctgcaactggatattgaagactcagttagttttttctggggagcctcccgtgcaggtgtccagcctgctcaccccagccatagaaggagcctttatcctgagagaagctacagagccctggaaagctggggtcccacaggcagatgcagttgaggttaagatgaaaggaaactgagagggtcttactgatgatgcagtcgttatgttttgtggcactttctgtactttgtaaaataaaaacattagatttatgtaaaaaaaaaatgaattccaaaaaattattgcaacaggagaaagtaccaactaaatataagatctttatggcttgcaaagatgtaggcagaaaagggctttcttttttagggagaggtaaacaagataagaaaggaggtgggaggtgaatggcaaatggagagtgaaaaagtcagattttagatcagaggatgtcttaccctgaaatcagcatgttcttaggaggaatgtaaaatggggttgtatgttgactcagactgagggtagctcaaagttcaggagcctgagggagggaaataaacttaagaaaagtatgattaagaaatattttattttagtccgggcccagtggctcatgcctgtgatctcaacactttgggagtctgaggcagtcggatcacctgaggacaggtgtttgagaccagcctggccaacatgatgaaatcctgtctctactaaaaatacaaaaattactggaaggctgaggtgggcggatcacctgaggttgggagtttaagaccagcctgaccaacatggagaaatcccatcactacaaaaaaaaaaaaaaaatcaacaggtgtggtggtgcatgcctgtaatcccatctactcgggaggctgaggcaggagaatcgcttgaactcgggaggtaaatgttgtactgagctgagattgcaccagtgcactccagcctgggcaacgagagtgaaactctgtctcaaaaaaaaaaaaaaaacaccaaaacaacaaaaattcgccaggtgtggtgatgggcacctgtaatcccagctacttgggaggctgaggcaggataattgcttgaacccaggaggtggaggttgctgttagccaagatcgcatcactgcactccagcctgggtgacaaagtgaagaaattattttgagcactgaagacaaattcagctgtttttttaatgagaaaaaggagaaaatgtgcagagcgtgtgtctgcctgtgtgataggtaagaaaagagagcactatcttagtcataatgggaagagtgtttgtttgcataaattgttcctggagcacacaaagaatggagaattttattaatcacaaacattttccagtattatctatgtgtttcatctttccccatttcttttctttgttctatgcatttctcccatttggcttttcctgggctgcgtctcacatattaaactggtaaacataactacagtgttttgctaagttctgtgagtagctctaccagattattaaaattcagagaggttatgggactaacaagtttttaaacagtagctcagaagcatagatgggcccatggggtttttgactggcatctgcagtgaggacagtgttgtaggaccaagccctgaatcagggtctgtgttgactctgggtggtgtcagaattcaaatgttagacaataagttggtgttggagaattgtttaatgttcagctaactctacagatttggtgccagaaaaaagatatcacagaggcctggcctggaataaaactaggtgtttgggaatgggagctctgctttcccatacacaggctgtcacactgcccattgtcctgtgattcaggtcttctcccagggtgacagaggactgaaaacttagaggacaggagctctgattacagacccccttttcccacagctgccaccacaagattcccacccactcacaaacacacacactagacattgacacgtccacactcctcccaggactaggcaccaccctcagaaacttcaccacagcatttttgaccctagtgtttcttgccaagaacccacaagtctctgcaagtctcctggcatatccccatccacagatgctaaatctgcagcagcaaccagttttctccaccaacctaccattttggatcagctgttcataatctcatctgcctgcacacagtaataaatcagagtatggctgcattgggaccactatctgcagcaaaaatcagtcctctcacctgcattgcactctctcctgcccagggatttaattttttattttagcttttatttttgattcggggtacacgtgggtttcttttacaggtaaaattatgtcatgggggttttgtgtgcagattattttgttaacttacgtactaagcatagcaccaaacaggtatgttttctgatcctctgagttctcccaccctccaccctcaactaggcctcagtgtctgttgttctcctctttgtgttcgtgtgttcttattatttagctcttacttataaatgatagtacattcatttggttttctgtttctgcattattttatcttttttttttttggagacggagttttactcttgttgcccaggctggagtgcaatggtgtgatgtaggctcacctcaacttccacctcccggttcaagtgattctcctgcctcagcctcatgagtagctgggattacaggtgcattccaccatgcccagctaattttgtatttttaatagagatggagtttctccatgttgggcaggctggtctccaactcctaacctcaagtgatcaacccacctcggcctcccaaagcgctgggattacaggtgtgagcactgcgccaggcctctgcatttgttttctaagaaaaatagtgtccagcttcattgatgttattgcaaaggacgtgatttttttttaatggccacagagtattccatgatgtttacgtaccatattttgttttgactaaatcttttattttattttatagttggagacagagtctcacttattgcccaggccagagtgccatggcgtgatattggcttactttaacctcaacctcccaggctaaagcaattctctcctacctcatcttcccaagaagctaggactacacctgggcgttaccacacctggccaaattttctttttgtattttccgtggagacaggattttgccatgttgcccaggctgttctcaaacttctaagttcaggcagttcacctgccttggcctcccaaagtgctggaattacaggcatgggccaccgcttctgaccataccatattttctttacccagtctaccattgataggcatttagggcctgtccttgtctttgctattgtgaatagtgctgcagtgaacatgcatgtggatgtgtctttataatataataatttatatttccttgggtatatacccaattttgagatttctgggtcaaatgataattctgttattagttctgtgaggaaccgccacactgctttttacaattgttaaactaatttacactcccaccagaagagtataagcattctgttttctctgcaaccttgccagcatctgttattttttgactttttaaaaatagccattctgactggtgtgaggtggtatctcattgtggtttttcttttaatttctctagtgattagtaatgagcatttttttcatatgcttgttagccacatgtatatcttcttttgaaaagaatctgtgtttttgcctacaatttaatgaagttgtttggttttttcttttaaacttgtataagtttttaataaattctggatattagacctttgtcagaggcaaagtttgcaaatattttctttcattctgtaggttgtctttttcctctgttgatagtttcctttgctgtgaagaagttccatttgtcaatttttgcttttgttgcaattgcttttggtagcttcatcatgaagtctttgccagtttctgtgtctagaatggtgtttcttaggttatcgtgcagattttcttataattttaagtttacatttaagtgtttaatttatcttgagttgatttttgtatatggtgtaatgaagggatctagtttcagtcttctacatagtgctaggtagttattttagcaccatttgttaaatagagaattcttgctgcattcctcttgtcagctttgtcaaaaatctgatggttataggagggtggcattatttctgggctctctattctgttgcattggtcttgtgcactcgtggattttttataacatctttctctcttctcctttttccccataaacattctttgaagtgcatacagtgtgaaaaattcagatgtccaagagttcaaaactatttaaaaagttccaaaacaaattttgctattctgtctgttcttaagggatttagattatatgtagatatttttctctgcttttttgaaatatatgtaaatcatattaacagctaaataaacctttttcattttttatgactccagattatctttatctggtacttcagatttattgctttgtttttgcttctgaaaagtttatttttttcatttttagtcctttaaggtagacacagatttgtttagttaaaactcatttaagagcacacagaagcatagcacaaagataaaattaaatttagcaatacagaatgataaagactaaaagatactaagtttctttgacagaaacctgattatccaaggtaattatccaatatttgcaggctgaagtactaatactgcaaatgcaagaacagttcaatgcatgaactcaacagtggaatctgtagttgtaccttgttttctatttattacttcagaacaattagcatagttatgtttagtgtttgtagacaaactgcattcatataaattaaacagtgtttcctcttttttgagacagactctcactctgtttcccaggctggagtgcagtggcgtgatctcagctgactgcaactgctgcctcccagattcaagtgattctcctgcctcagcctcctgagtagctgggattacaagtgcacaccaccatgcctggctaagtttttgtatttttagtaaagatagggtctcaccatgttgtccagcttgatcttgaactcctgacctcaagtgatctacccatctcagcctcaagttgctgggattacaggggtgagccataagcagtattttctacaatattatgaatataaagccacaatacttactttgaatcacttaaatggttattttaatattgtaatttatacttttgaaatataaagtgttttaactgaagtatagttacagtttttaaaaatggtacatatactatgacgttcattaaaattattcatacttagatatttatatctaatagccagagaaaatttactaccaaattattacagtagatatttgtctgacatatttattactttattcaataggaataacaatgagtaaacacaatttaggtatcttttatttcactaaattggtatgttcctattacaggacagataaagacaggtgatgtggccaccccaacaccataatacctcttcagttagctatgttgcaagttctaatatattccactatacgaacacaatcagattctatttcttcatcaaaaagtgttgtttgaagttgtcagatgtatttcaatatagaacccccattcaatggctagaagatgagacagcagcagagatggaaaagaaactttataaaattattctttctgaaaatctgcaccctcctaatgctcatgtttctcatggtgagagtagctatacactttgagtgtttcgagagaaatttattttaggagaatattttctggctgacttaacaatcttatatctaatctgacctttttcttaagatctttttaacttccttctctcaaaattatcttgctcagagggagatctgtttttctctccaatgctttgtctgtttcagaagccttactagtatcccgtggtgtctgaatgaggtgggttgtcacagtgaaaacttctgatgttatctctatctggactcatgttggaaattcaatattttttccatgtcaccattataagtagaaagtgaggctgaaacactgctcccagtttcattattgtgaagatatgattctacccaggaggcctgcaggctctcctcctgcagctcaggcctcactctctgttgtgacattagagtgttgctgtggcaaatgtagttcacataaaatgtgagctgtgctctgggctgtgcctcagtggcagatagtagaggtcaagagaggagaccagcaaccaggggaaagcaagcaggagtgctgtagcccagtgccagggagtacagagccactgctctaaaatgtaaatagccaaagagagaatcctattcaaccatttttgtagcagagtgaaagcctaccttcagcagccactgggcttcaagctgctaaactacctcctgttctgaagatgtggaaagtttatttgtcattggatataagcatttagcatacccagatgccctattccatctccaggtgattttaggatgaactatgtgtgacatggtgctataaattcttctacttgtggactaattatggtgaccatctttccatctttgtattctgttaaacatattgaccatgatgtatgtcactttcaagtttaattttataagaaagccattttctttctctggggctgaagaaaccattttctttttctggggctggagcttctctggggctggagaaaatttttcttctttttctgtttttgtttgtttgtttgtttgttttttgagatagaggtctcactctgtcaccaaggctgagtgtagtggcatgatctcagctcactgcaacctacagctcccgggttcaagtgactctcctgcctcagcctcctgagtagctgggattacaggcacctgccactgtgctgggctcattttcatgttgttagtaaagatggggtttcactgtgttggctaagctggtctcaaactcctgacctcagttgatctgcccacctcagcctcccagagtcctagtcctgggattacaggtgtgagtcactactcccagcccaatttttcttttaattattgtttccaaacactgtctagaattaccagatgtgatataaacacataaggtgccaaccagaatttactctagaggggactttccctctcaggcttccagtcaacttatacttgtgcagcaaagtgcacgctgtcccctaaatatgcaggcagaattgtgtctctgcctatttggtatctagagttctctacaatcacttctagagaggctagatcaaatttctacaaacttcacgggcagcaatcaatcattttacctctttcactgactcttgtatcttcagactgaaactgattcagagaatatggagcccagaaacccaatcagagtaacatgtgtgcattgagtagacatagagacatgagaatctccactttcttcttcctcctcttgccaaaatgcccacaaacgtacaggtaatacctgctgctactccagccattcaggccataaatctgcagcttcaaattttgaatccaggtcatgagatttgagaaataaaaaacttttatctgaaaaatgcaagtccttttggttatcaaactcagagagacattaaaataaaagtgcagttacatctttatcctattaactatgtattaatctcttgaaactgttccctattggcacaagtagctataaatgacactaataatgccacattggacactatatttttgtttgtttgtttttgagatggagtttcaatcttgttgcccaggctgagtgcaatggcacaatcttggctccctgcaacctctgcctcctgggttaaagcagttcttctgtctcagcctccccagtagctgggattacagacatatgccactatgaccagctaattttgtatttttagtagagatgggatttctccatgttggtcaggctggtcttgaacttctgacctcaagtgatctgcccacctcggcctcccaaagtgctgggattacaggcttgagccactgagcctggcctggacactatattttataccctaaaccattatgatatatatctaattaataatcaatgctatttctgtaaataaaaatttctgaaaaacaactttgtgtcagcccactctctgtccctctgttgttgtctttacaaatcctcttgtaattgctgctaattaaagtgtagattccaggcaacttgaatctttgctcccaggttatgatccttaaacttgacccaaataaactgtctacttatgttcatgttgtgtcagccttttttaatatatatatagacttatcatttagaatgtgctagagcagccttcatgaggggatctctacttagattgtattccacttgctgtaacatcaaaggatgcagagccaggttgatcctacctagaatctgcaattaaggtctggcctctgcctgggatttacaaaaaagcctggactttggatagaaaatgtacagaaaactaacaaaaggcattttctgcgttgtgagatgtcaacctaaacatcttacagccccattttgggagtgtggctctttgagatttttcacatcttgttcattgacctgctacagtgatgtgagaggctccaggaggaaatagaatctgatggcagaatttgtaagtgtaaataagcatcttaggcatgagagatcaaggccacaaagtatccagagccatgatcacaattataattacctgtaaagtggaatactggagaagagttatttttgttatttcctttacccatgagctagcaaatcagaatgggtgttccaggttctggagttccaccagggcagttccattttctatttagaatcagcctgagtctctccagcctggttgatcattgggccatcagcccagggtcactgggaattccctcaaaatcacctaggtgtctttgaggtatttgaggatgttcagagcagaattgtgttagactgacaagagtggttaattctgcttctgtctcagtgtaagagaaatgagtcatcctgtgttttttcatcccctcatacaagaggtatctttggttgctacccagatgagagtttctccagtttcctgttacttggatgataaagaaggaggagatctggagactcaaacagataaactagttgcttcaatttcatatagccattaaaaaaccatgaagcagtcatggttcctacagtccagaaatgtttagtctagactagcaactggataaataattatgcatcatatggttggtacaataaacacgtgtccaaaatcttgggctttatttagtctactttgtttatattgtgacttctgatgtctacatctcaaggcatatttatgaacagaaggattattataatttttattttgagacggagtctgtgtcacccaggctggagtacagtggtgtgatcttggctcactgcaacttctgccaccctggttcaagtgattctcctgcttcagcctcctgagtagctggcattacagttgctggccaccatgcccagccaatttttgcatttttagtagagacagggtttcaccatcttggtcagactggtctcaaactcctgatgttgtgatctacccgcgtcatcctcctgaagcgctgggattacaggtgtgagccaccacgcctggccatataatttctatttcttttaccttgctaagtgtacatatttattttctaataaaattaccctagaaaggctgggcatggttgttcatgcttgtaatctcagcactttgggggtctaaggcaggtggatcacaaggtcaggagtttgagaccagcctgaccaatgtggtgaaacgccgtctctactaataatacaaaaattagctgggcgtggtggcacacatctgtagtttcagctactcaggaggctgaggtagaagaatcacttgaacccaggaggcagagcttgtagtgagctgaaatggcaccactgcactccagcctgtgcaatagagtgagacttcatctatttaaaaaaaaaaaagttaccctagaaaaccttaaaggatttgtttaaattgcgtattagtatgtagcataaagttgacagggcagtggctagaaaatattaaaattacagaaattctgggatttaagtttttcttttaggtaacctttgaaaaaagaatactggtagtactgcagtggcatagagggaagaattctacatagagtccccaccctgcctcagacctgttcagattcaccctttttggaggccttattttggtctgactataccttggagtctttcctcagagaactgattagaagagatcagagttttggctggtgaatcctgttgcctttctagagctggtgttcacaatttcttgaaacccaaaaacagataaatgggataaataacgtatgtattttagggtcctagattttaaatgttctattaaaaccagtgtttgcagagacattatatttagacacttgttttctattcctgcagatccagtagttgctccataagtcacaaaaaagtaaatataaagagaataaaattttgtctaaactacattaacctctttctttctgtatctctttcatctgtctatatttagcttttattccttataatttaaaaaaaattgatgacagaggaacagaagaagaaatagagattctgggcccttttttgaaatcctggaaattattaaacccttagtaccagctcccaggatgttacgagaattaaatcacataatgtgttatgcccagcacagtgctctgtatcatgctcttgagcacacagtatctgtttaataaacattgcattagtacatgtgtacatgttgtttttaaaatacagacttattcagacattgctgccttctgtttcctctccttgtttgtaccagaagtatttggttgtgacaagagtgctaagtgtaagggatcctgtgctgtgcctgcttctctaactaatgtaaataatgcgccaagggggagcaacatcagctttgacaggggacttgtttaaaacacccatgcatagacccttttcaaatctgcagaattacattacataaagtggggccaaaattaccaagtgatttataagcttgttaaagcttgagaggcaatgcttagcttagtgattatcagcccagggttctcattaggatcacatggccaatttgcagaaatctcttgtgccctccccacaggttctgtttattgttctgggtggaagcatccacgttgttttaatgaagggcctcatgtgactctaaggtgaggccagaatcaagtatgaaggcttcaaaatacattcatgagagttaaattccacctttgcactaaagggtggtcacagggcctattctatttgggtttggtagggacaggtcagtgtggtgcatatttccattactgtggcagaaattgctggtgtctgtggcaggggagggcacctgaggacaggaaaggagaaacttatattttcatcttcatggagcagctcattgctcctgaatctcttctgttttaaaggatagaaatggatggatttttctgtctttttctgccaattgatgccatgctagctggtaaacatgtggcactgacacctttaaaggcatattctcaagatgcaggggtaatttgtccagagaatcttcatctgagaaggaattccagagaaggaggagatcagaaagagaaaaaaaaagggcttcaggtaaacatgcctcagctgaaaagctatgtccactctgcctcctggaatgccatgtatctagtacttgaaaacttttacttctctacttgtgtttttcctccctaaggagtttggtttaagtacttcttaaaattcttatgatagtcaaacgtgtctgaaaagtatttcttccctgtatcccagagccttctcttcattctctacatcataacttcttatacgccatgcagatttatcaacaggaatttatgatctgcaatattaaaaatgttccgtttgtggctgttgaacatggaaagatgtggatactcaagatttctattggggaaaactgtggtccttagtaaagatggagaaaatataatgttgaggctccattcatgtgttccattagctgtatgctgaacaggattaaggaattgcttatttaggtcgggcgtggtggctcatgcctgtaatcccagcactttgggaggtcaaggcaggcagatcgcctgaagtcaggaattcgagaccaacctggccaacatggtggaaccccgtccctactaaaaatataacaattagcctggcgtgatggcaggcacctgtaatcccagctacttgggaggctgagggaggagaaccacttgaacccaggaggcggaggttgcagtgagctgagatcgtgccattgcactccagcctgggggacaagagtgagacttaatctcaaaaaaaaaaaaaaaaaaaagaaaattgctcatttaaatgtgatggcatttattacccagaaattctgaaaaaaattattaggagatacctgctttctagggtgttaatgaagcctgcttaatattactactaaaaattacagaacataggaggtatctgtattttgaggtttgcataaaactgatgattctttttgattacattcagattttatttgctttttttaaaaaggaatatttcaatagtgatgctgtattcttctgtatgcattaacacatcataaaaatttgtcctagtgcagttaatggttaatgattcacttgcttaaataggtctctgacagacttttttttactatatagctaattatttttctcttcattattaagtttcattatgcagctgatgtgaacaaacaatcatttaatctggcagctgttcttttttctttttttctacatatttttctttggaaaattaaggctcttatctttgtttacaggccagaaaaactggaaaaaacacaggctcttccacttactggatgtttgacaaaatattcttcttgggccaaaaacattgacattattggttagcttgctagaaattcaaaaaatcagactttattccagatcttctggaaaaaaaccctgcataacaaggtcttcagcttattgtacatattaaaacatgcctttttcatctgaaaaatattcacaactcattccatatgatgtaaatatagcactcaaaaatgtacatgtttgtgttcatgcccttaattttatagtttattttctagaaaaatatatgaactgatgttgtggatcttatgttcctttattttctcagagttagagaatactttagagaatatttctgtgttgaaaattattttataggataactttagtcagtcctataagtcagaaccagttatctttactctctcatttcaccttaagtcaaattaaaaattccgcccataaccacttggtgaaaatgtgtgtgtgtatatttttcaggggccattgcaatttagagatgtggccatagaattctctctggaggagtggcattgcctggacatggcacagcggaatttatatagggatgtgatgttagagaactacagaaacctggtctttcttggtgagaaaaactttaatacataactcataatatacacaaattgttttatttctcttttttgtagaatgttagtaatttattctttttataaaagagtttcagatccagtttttcaagaaaatcttcagaatttgttcatttagaaaagaattactttggtgcctcatgcctgtaatcccagcactttgggaggctgaggcagggggattacctgaggccaggagtttgagaccagctggccaaaatgctgaaaccccaactctaataaaagtacaaaaaattagctgcgggctgtggcatgcacctataatcccaggactcaggagggtgaggcaggagaatcacttgaactcaggaggtgaaggttgcagtgagttgagatcatgacattgcactgcagcctgggcaacagagcaagattctgtctcaaggaagaaaaaaaaaaaagaaagaaaaaaatttcttcaagatatttcatcttaatacaaactttccacatttctgaggtgagttatattcttcactctaaattagtggtaattccagaaatttactgacttaaaatattgtagcttccacctgaaaatctacttgccaccaccaagttttgattcagtagtaccaggtagtaaaattaggaaacctacaaattgaaagtattttcttttcttttcttttcttttcttttcttttcttttttttttttttttgagacagagtctcactctgttccccaggctggagtgcagtggtgcaatctgggcttactgcaacatccacctcccaagtttctcctgcctcagcctcccgagtatgtgggactacaggcacacatcactatgctccgctaatttttgtattttcagtagagatggggtttcaccatgctggccaggctggtctcaaactcctgaccttaggatctgcctgcctcggcctcccaaggtgctgagattacaggcatgagccactgcaccaggcaaattggaagtattttctaaatatttagaaatctctgttacaaatttgtattttgttattaatttactagaatattttatcacatcatctttcctgagcacattactagcttgtaattggagaatgtgagcaagattcatgttatttatttttgataaaacaggtattgttgtctcaaagccagacctcatcacccatctggagcaaggaaaaaaaccttcgactatgcagagacatgagatggtagccaacccctcaggtaggtgtgagtgaaaatgaatacaacagacaacacagtaagaagtccaaggtcaaaaagaaagccagtccttaaggtgtgattctggaagctgtgttccaaaggaacttctgggcagctgttttttttgttttttgtttttgtttttgttgttttaaattttgctgtcacaaaggggcatattgtcttatgcttctaaattctctaaaaattctacttttctctcagtgagcttccttcacattcacagtgagagccaaagtcctcttcatgacatataagagacagcacaatccagctgctttttcattgttttggggacacacaaatatcttcctaattttgagaaactgaaactattttttagttttctttttgtatccggtctgaaatttgtgagagtagtagtttctgttgcatttttttttgttcatttttgtgcacagtccattctatttttattactatatagtcttgaaatatagtttgaaattgtaagtacgatattctgttttcttctttttcctcaagattgctttggctattcaaagtttattttagtttcatgtaaattttagaattgtattttccattattgtaaaaaaaaacactgcaattttaataggaagattattgagtctgtaaatcactttggataatatgattctttaataatatttattcttttaattcattgacataaaatattttaaaattaatttttatcttctaatttttttattttgttattgtaaacttttttttacctccttggttaatttttttctcaggaatttatttaatgctatattaaataagattttttcttcctcatcagatagtttgttttaagtgtaagaaaccatacatatacttgtgtgtttaattttatattttgctaatttactgagtgtatttattagtttagacaggttttaatgtactgtttatggttttttaaatataaaattgtgtgatttacaaccagcaacttttttttttttttttttgagaggggctttcactctttttgcccaggctaaagtgcaatggtgtgattttgactcactgcaacctttgcctcctgggctcaagtggctctcctgcctcagcctcctgagtagctgggattacaggtgttcaccacaacacccagctacttttttgtatttttttggtagagacggtgtttcaccatgttggcaaggctggtctcaaactcctgacctcagatgatctgcccgcctctgcctcccaaaatgttgggattacagccatgagccaccatgcctggctggatttttttatttctgtgaataattcttctgccacatacttccatcactacattcaaatagaagcattgacaatggacacaatatagttttgtattggtgtctgaatttgatggagtaaacacctcttcaagttttcataaactgattttagaagcatttccttagggaactgtgtgggtttctttttttctttttcttttttttttttgagatggagttttgctcctgttgcccaagatggagtgcaatggtgcgatctcatctcaccacaacctccgcctcttgggttccagtgattctcctgcctcagcctcccaagtagctgcaaatacaggcatgcgccaccatgcctgggtaattttgtatttttagtagagaaggtgtttctccatgttggtcaggctggtcttgaactcctgacctcaggcgatccgcccgcctcagcctcccaaattgctggaattacaggtgtgaggcactgtaccctgcccaattgtgtgggtttctatgtaggcagaactgaccataaacttggctcaggtaactgaaactgagtcatagaaccgcttcagggatcccagtaaagtccaaagtctgcaggcctgcctacattgttgtaaatgggtgccttcctccaggtctcttgaatgtcaggacctctgccagactctgactgggaggagtttggattggttacagagtaagttcagaattctcagtgggaccaagttgggtgaaccctatctggtctgtagccatgagtaggggtcctgcagtttcccacctgactaagggcaggttctcttctgaatagaacacttctcaatcttaagctttagcagcatttcacaactccctccctggatctcaaatctctcttagtggcgtgtattttggagatggggtcttgctacataacccaggctggtctcaaaatcctggcctgaagcagttctccaacgttaatgtaccatgtatctgtcattacaggtgtgagccataatgcctatttctctcataaaggcatttttgtcagagatggctgacttttttttttgctgtaagggagtatgaaaatagggacttttaatcttttcatcttactgatgtcactctccctatacatttttactttctattttctctttcagatttgtctgtaaatttagattcagatatttaggacaatgtgctagaatttgcatggtatgcctgaagtaaattagataactcatagggacccatattactaaaatagttacttatgaatttaagtttgctgcaggcaaaaaggaattaaaggattttcatcttttttttagcctatatctaaataataacatagtttatttctcaatatttgttttacatatcagagggtctaaccctattctgcaaattgtataattttaaatttaacaatgtaaggctactctttgcttctaaagtttgattatagctgttttattttgtgtaaaaataccatatatttaaaacattaaaagtaactagtttccttaaaatgctaatttttaagtttctcattagaatcttctatttataattatactgcatattctctgaaattttactgccacacagggcatgccaatgattcaaaatacctgcatttagtgagtacacactaacagttaaatatttcagttacctagaaacatttttattttttttgagatggagtcacactctgtcacccagcctgcggtgcagtggtgtgatcgtggctcactgcaacttccaccttccaggttcaagcaattctcatgcctcagtctctcaagtagctggggttacaggcatgtgtcaccacccctggcaaatttttgtatttttagtagagacagggcttcaccaagttcgccaggctggtcttgaacttatgacctcaggtgagctgcttgccttggccttccaaagtgttgagataacagttgtgagccaccacacccggcctgacaattttttaataatgcatcaatgttgcatgctagattttttttttttttttttttttttttttttttttttgagacggagtctcgctgtcgcccaggctggagtgcagtggcgcaatctcggctcactgcaggctccgccccctggggttcacgccattctcctgcctcagcctcccgagtagctgggactacaggcgcccgccacctcgcccggctaattttttgtatttttagtagagacggggtttcaccgtgttagccaggatggtctcgatctcctgacctcgtgatccgcccgcctcggcctcccaaagtgctgggattacaggcgtgagccaccgcgcccggccgattttatgagtaaacatttattattgttttgaagttttatattagtgtgtttttcagtgtaggttttttttttttgggatggagtcttgctctgtcacccaggctggagtgcattggcgtgatcttggctcactgtaacctcttcctcgagggctcaagtgattcttctgccttgacctcctgagtagctgggactactggcgtgtgccaccatgcctggctaatttttgtatttttagaagagatggggtttcaccatattggccagtctggtctggaactggtgacctcgtgatttgcacacctcagcctcccaaagtactgggattacagttatgatccactgcacctggcctcagtgtaggtttcttaccattagtttattgggtgttttggttttacttatgtattataattttagacaatttgcaattctgcttgtatactttaagtcaattttaggtttaagagataaattatgcatgtctgtcacaatcaggttacatatgtatgtctgtttataaatatgacaccaattttagttatggcttatcttatactctttcttagcttattttccatggtagttttatcttgtctaagtaagtactcatggggatagtcttattttaccatgtgtttagtaattaatatgtatttcctttcatgagagaaacatttttgtgatttgaaggtaattttcaaaaaaatatgtaatttttttttcagtttttctttaaaaaaattgttttaaaaacacataatgtaaaatttaccatcttaaatctattgaagtgtacatttcagggccaggcgtggtggtggctctgatctgtaatcccaggattttgggaggccaagacaggaggatacctggagcccaaaagtttgagaccagcctgggcagcatatggagactctcctctataaaaaaaattaataatagccaggcatggtggtgtgcagctgtggtcccagctacttgggagattgagggggagtcaaaattgtgccactacactttagcttaggtgacacagtgagaccccgtctcaaaaaaagagctgttcatttcaggcatgttaattatattcacactgtcatgcaaaaggcttctagaaactttacatcttgtaaaactaaaactcaatgcccattaagtaacaactgctcattttacactctttccagcccttgacagacaaaccttctactttctgattttatgattttgactacttaagatatctcatataagtggaatcatacagtatccataattttgttactggattaattcaggtggcataatattttcaatgttcatcttaaaatgtgacaagattattctttttaaagtggaataatattccattgtatgtgtatgttatattttttgatgtgtttataaattaagagatatatgctggtttagccttttggcttttgtgaatactggtacaaaatacatgtattttcaattatgtcttccaggtcctgtgttgcatattttgtttttttgttgttgttttctttctttctttctttttctttctttcttttttttttttttgagatggaatcttgctctgttgcccaggctaaagtgcagtggtgcgatctcagctcactgcaagctctgccttctgggttcaagtgattcccctacctcagcctcccaagtagctgggattacaggtgcacgtcacatcgccaaggtaatttttgtgtttttagtagaaatggtatttcaccatgttggccaggctcgtctcaaactcctgacctcaggttatctgcccacctcaacctcccaaagtgctaggattacaggcttgagctactgcacctggcctgtgttacatattttagatatagatttataaatgaggaatatttataacattttaaaataatggctgtgtctttgttttccaccagcaatcaacatggattttatttttacacctaatgagtgtgaggcgattttgttggtattgtgttttttgttttcatttctctacaaattagtaattttgtgtgttttttcaaatgctttttcccatttgtttatttttatgtctaagtattttatttaaaatatattattgtatcattcaaggaaataatccaacttcattttatcagtgttgacattcagttttcaacatcattttttgaagagattatttctctctattttgtatgcatggcaactctgtggaagatcatttgatcatatacagaacggtttatttctgagctctctattctgttcttttatctgtttgtctttgtgtatcacattgtttaaattccatagcttttaactgtaggttgtattgacatctttgaaaaataaaatttgttgccccctgagcaagaatatgttgaagagtgtgtttcatattcacatatttgtgaatctgccagtttgacttttgcttttaattcctagtttcataaagtttttgttagaaaacacacagtgtataattttagtgtttttaaagtgattggttgttgttttgagacaagatcttactgtcacccaggctccaatgcagtggcataattgtggctcactgtagcctcagcctcctgggctcaagtgatcctttcacctcagttttttgagtagctaggactacagacatgcactaccatgtctggctaattgtttgctagtttatagtgttaggatctcactattttgcccaggctggtctcaaacttttggccccagtggatctcccaaagtgttagaattataggcaggagccatggcacccagtaggtatttttaaatttaataaagcttgggtatgtgtcctaacagaatacaccagatgcaaataagaatattgtgtattatcttggttttgatgggagagtattttatgtatctatgaagcctatttggtctataatatggtttggatgtccttgttgtccaaacctcatgctgcaatataaatcctcaatgttgggtgtgggacctggtgggacatatttgggtcatgagggtgaatttctcatgaatggcttggtacatactcttggcaaccaaaaagattagactctatcaattcaaataagagctggttcattaaaagaacatggcttcttcacctcacacttactctgtctcttaccatataatatatccagttattccttaccttccaccatgattttaagcttcctgaaatcctcattagaagcacatgctgacacacacttcttgtacagtctgctgagctgtgagccaaataaaccttttttctttataaattatgcactctcaagtattgctctatatgcaaaataattaatatggtctataatattgtcacagttttctctttcttagtttttatctgaattttctatttattaattgcaaatgggttcttgctgtctacaattattatgttgctatgtatgccttgcttcacttttgtcaatatttgctttatatattttggagccctgatgttatatacacatatacatatagatagataaatattatagttatagattcctgctaaatcaattcactttaccataatataatatcagtcattgtcccatggtcgtacttgacttaaagcatattctgtctaatataattatgaccaccttactcaattgtggttactattttcatggtacataactttttttcattctgttactttcaccctatttgactcaatgctaaaatgagtctcttgtagggagcatagtgtatgctttttaaaaaaccactcaggcattctatatctttttttaatattttcattatgcatatattcatttattattcattttattttattttattttttgagatggagtttcactgttgttacccaggctggagtgcaatggtgcaatctcagctcactgcaatcttcacctcctgggttcaagtgattctcctgcctcagccttccaagtagctgggattacaggcacatgccaccacacctggctaattttttgcatttttagtagagatggggttttcccatgatggccaggctcatcttgaactcctgacctcaggtaacctgcccaccttggcctcccaaactattgggattacaggtgtgagccactgcatccggcctcatgtatttttgagatagggtctcactctgtcaaccaggctgatttgcatggctcacggctgcttgaacctcccaaactcagatgatcctctcatttcagcctctcaagtagctgggttacatgaatgtgccctcacacccagctagctttttttgtatttttcatagagacagagttttgccatgttgcccaggctgatcttgaacttttgggatcaagtaatcggcccaccttggccatccaaagtcctaagattacatttcaaagattacatttcatttcattaagtagtttaatgagagtcctgtatttttgtatctactgaatgatgtggtgacagaaatttgcattgcttttactattagtaaaattagtaacaatgcagtaattatgcaaaagctaatatatgtgctgccttctgttttattggtttactttttcacctttatactcataacaaattattttaattctgtagctttttgatgtgttttgaaatcagaaatggtaatgcctccaacattgttccattttggtagattgttgggtactttattgtctctttagattccatatacttttggatttgctgtttttatttcttcaaaaatgcaatgagacatttgaaaaacattgaattaaatctgtagattaaattgagcagtacagacatcttcacaatattaattatttctttttcagtttgtttttgaggtggagttaaaatcactcacctcgacctcccaaagtgctgggattacaggtgtgagtcactgcacacagcccagttttctgaacaagtgcatgctcaagagtgtgttttctcatttccatatatttgtaaatttatcaattatttatattattgttttatactctaattccatttttgtcatagaaagtaatctataaaatttcagttttaaaaaatgtgttaaggcttcatttttggcctaacttgtggtctatataggagaatgctgtatgagctattgagaaggctgtgtatcctgatgttgttgaggagtgttctctataccttcattagaaataattgttttttactgccttctagtcctctgttcccttattaatattctgtcttgttttattattacagaaaatgaagtattgaaatatcctactataattatattgctctctgtgtgtattcaattttgtatttgctttatatatttgaaactctaatctgagacacacacatgcaaatacatacatgtataaacaaatttgtcatagattcccagtgaaagaatacatatattgtttaaagcccttctttgccttcttgaagttttgacttaaagtacattttataaaatatgacattttcttacttaagatgcagcttgtgtaatattattttgagctcttttgctctaatttggttaatatttacatgaaatttctacttccatcttgccactttcagtctttttttatcattagatctcaactgactcttgtaaaaaggcaagttgaatcttgatttttaaaattttttaataaacctttttatttaaagtatgtctcttgatttggagagataattatatatatttaaatagttttctgcaaaagaaaaacttattttattgttttattttattcttgtgtctttgtctctcattttctctttctgtcttttttttttatctttgtattgacatgctttcagtttcttattttcttttgtgtatctgtacagacattttctaagtggtaccttctgggattacataaaacctctaaaagatccaacaatatatttaaatgtggtaaaaaatcaacttcagtttcatacaaaaatttttcatcattacatctgccttctattttgttattgagtttgccaattatattttttatgtttgtatattcattaacatgtttataataatttctatagtttttatcttttaaattttagagaacaattaaaaatgttttctgcaccattatgataatgttaagaaattccatttttgtgtatgtgcatatctttcccagaaagttacatattttcatatgattatgggttgttttctttcaccatgttattttcagtggaggaaactcaccatctttgatatgtcaggcatatgcagtggcaatatacattctcaggatttggttattttggaagtgcttctttctatttggtagtaaaattgtggtgatgctattattctcacttgaaagctttttttaaattattattttaactttaacaatatcacagtttccttctcacttgcaaaaatttttttgataaattcacttgttatatcatgagactatgcttataaatgacacatcatttttatcttacagctcccaaaattctcttatctgtgatttttgaaattttgcttattatgtgtgtttgttataaatatcttggtgtgtacatttttaaagaaattttccaattatgttttgtatttttatatccacgatttttgttttttgctatttaaatgtttctggttgttattctcatttttctgatcttcagtagttgcctgtgttcctatttaacttactgaatattattcaatttattttattttatttatttattttattattattttctgagacagagtctgtctctgtcacctcaactggagtgcagtggtgcaggctcactgcaacctccatctcccaggttcaagcaattctcttgcctcagcctcctcagtaactgggattataggtgctcacaaccacacttggctatttttttatatttttagtagagataaggtttcaccatgttggccaggctaatcttgaacctctgacctcaaatgatccatccaccttggcctctcaaagtgctgggattacaggtgtgagccatcctgcccaccctattttattatatttttgagacaggcttcctctgttgtccaggctgtagtgcagaggtacaatcttcactcactgatggggccatgttgctctaatattttgtattcattgtaatctttgattgagctttggacattaacaaaaagctacctgttagaatctttaagatataactttattctggcatagtctgaaatcagttgtcatggctagagattttgggaatttctcaaacatgtttttaggatgtgtcttgtctaaaattttgtgtttattgtttagttaaattggcttattcatatttcttcttaataatcagtaatcacttgctagacttattccctgtttggggtagggcagtatctctgcttctgtgacatttatgtttagactcagcagactcaaactgttaatccaacttatatcgtcatttccttcagcattttatgtcatgggagacatttaccagtgtctagaaaagcccctaaaagccaaaaattaagatgtatgtgccaatatttttcctgctttttaaaagaaaccaggatttggcaatttacatttgtgtgtgtgtgtgtgtgtgagagagagagagagagagagagagtctcgccctgttacctatgctgtagttcagaggcatgatcttggtcactacaatatctgccattacagagtctcactctgtcacccaggctggagtgcagtggtatgatgtcagcttactgcaacctctgcctcctgggttcaagcaattctctgcctcagcctcctgagtagctgagattacaagttcctgcaccatgcctgtctagttttttgtgtttttagtagagatgggttctcaccatcttggccaggctgcctttgaactcctgacctcatgatcaacccatgtcagcctcccaaagtgctgagattactggtgtgagccatcacacctgaccagcaatttacttttaaaggcacaatgttatactggagagcaggaagagctctgttgggtataagtaacagactttttttttttcttctatgtggctctttgcattgtactcaccttgggcccttcatacacttaactcatttataaattttttacaaatgtattttgggcagtatgttttttttacatttatatgtccaggaagaaattacagcttgtgatattttgctacatcatcttgtttatgtagtttgtataattttataggttagatttgtaaagtatatttatctgagtctagcaagtgaagtagtgtgtttttatggtttctttcagttttgtgttctcattttaaccaagacctttggccagagcagagcataaaagattctttccaaaaactgatactgagaaggcataaaaaatgtggacatgataatttgcagttaaaaaaaggctgtgaaagtgtggataagtgtaaagtgcacaaaagaggttataatggacttaaccaatgtttgacaactacccaaagcaaaatgtttcaatgtgataaacatgggaaagtctttcatcaattttcaaatacaaacagacataagataagacatactggaaaaaacccttgcaaatttacagaatgtggcaaagcttttaaccggtcctcaacctttactacacataagaaaattcatactggagagaaaccctataaatgtatagaatgtggcaaagccttcaaccggtcctcacaccttactacacataagataattcatactggagagaaacggtacaaatgtgaagactgtggcaaagcctttaaccgctcctctaaccttactacacataagaaaattcatactggagagaaaccctacaaatgtgaagaatgtggcaaggcctttaagcgctcctctatccttactacacataagagaattcatactggagagaaaccctacaaatgtgaagaatgtggcaaagtttttaagtacctttcttccctttctacacataagataattcatactggagagaaaccctacaaatgtgaagaatgtggtaaagccttcaactggtcctcacaccttactacacataagagaattcatactggagagaaaccctacaaatgtgaagaatgtggcaaaggctttaagtactcctctacccttactaaacataaaataatccatactggagagaaaccctacaaatgtgaagaatgtggtgaagcctttaagtactcctgttcccttactgcacataagataattcatactggaaagaaaccttacaaatgtgaagaatgtggcaaagtgtttaagcactcctctcccctttctaaacataagagaattcatactggagagaaaccctacaaatgtgaagaatgtggcaaagccttcagtcggtcctctattcttactacacataagataattcacactggagagaaaccctacgaatgtgaagactgtggcaaagcctttaaccgctcctctaaccttactaaacacaagaaaattcatactggagagaagccttacaaatgtgaagaatgtggcaaggcctttaagtgctcctctattcttactacacataagagaattcatactgcagataaaccctacaaatgtgaagaatgtggcaaagactttaagtactcctctacccttactagacataagaaaattcatactggagggaaaccacacaagtgcaataaatgtggcaaagcctttatttcatcctcaaaccttagtagacatgagataattcatatgggagggaatccctacaaatgtgaaaatgtggcaaagccttagacactcctctacccttactagacataagataattcatactggagagaaaccctatgagtttgatgaatgtgggaaagactttaaccagctatcaacttttactaaatatgagaatttatggaacacaaacactacaaatataaagaatgtgacaaagcttttaggaagttctcaacccttattacacataattcatactggatagaaaccctacacctgtgaagaatgtggcatagcctataacaattttcaatcaattctttttttttttttttgagatgaagtttcatgcttgtcacccaagctggaatacaatgtgatgatctcggatcactgaaacctctgcctcccgggttcaagccattttcctgcctcagcttgtctagtagatgagattatggggggtggagccaagatggctgaataggtacagctcctgtctacagctcccagcctgagcgacgcagaagatgggtgatttctgcatttccgtctgatgtaccaggttcatctcactagggagtgccagacagtggctgcaggacagtgggtgcagtgcactgtgcatgagctgaagcagggcgaggcattgcctcactcacgaagcgcaaggagtcagggagttccctttcctagtcaaagaaaggggtgacagatggcacctggaaaattgggttactcccaccctaatactgcgcaattccaatgggcttaaaaaatggcacaccagattatatcctgcagctggctcagagggtcctatgcccatggagtctcactgattgctagcacagcagtctgagatcaaactgcaaggcagcagcgaggctgggggaggagcgcctgccattgcccaggcttgcttaggtaaagcagctgggaagctagaactgggtggagcccaccacagctcaaggaggcctgcctgcctctgtaggctccacctctggggtcagggcacagacaaaaagacagcagtaacctctgcagacttaaacgtccctgtctgacagctttgaagagagtagtggttctcccagcacgcagctggagatctgagaacgggcagactgcctcctcaagtgggtctctgacccccgagcagcctaactgggaggcacaccccagtaggggcagactgacacttcacacggctgggtactcctcatataaaacttccagaggaccgatcaggcagcagcatttgtggttcatgaaaatccgctgttctacagccactgatgctgatacccaggcaaacagcgtctggagtggacctctagcaaactccaacagacctgcagctgagggtcctgtctgttagaaggaaaactaacaaacagaaaggacatccacaccaaaaacccatctgtacatcaccatcatcaaagaccaaaagtagataaaaccacaaagatggggaaaaaacagagcagaaaaactggaaagtctaaaaagcagagcacctctcctcctccaaaggaacacagttccccaccagcaacagaacaaagctggatggagaatgactttgatgagttgagagaagaaggcttcagacgatcaaactactccgagctacaggaggaaattcaaaccaaaggcaaagaagttaaaaaattagacgaatgtataactagaataaccaatgcagagaaatgcttaaaggagctgatggagctgaaagccaaggatcaagaactacgtgaagaatgcagaagcctcaggagccaatgcgatcaactggaagaaagggtatcagtgatggaagatgaaatgaatgaaatgaagtgagaagggaagtttagagaaaaaaaattaaaaagaaacaaagtctccaagaaatatgggactatgtgaaaagaccaaatctacctctgattggtgtacctgaaagtgagggggagaatggaaccaacttggaaaacactctgcaggatattatccaggagaacttccccaatctagcaaggcaggccaacattcagattcaggaaatacagagaacgccacaaagatactccttgagaagagcaactccaagacacataattgtcagattcaccaaagttgaaatgaaggaaaaaatgttaagggcagccagagagaaaggtcgggttacccacaaagggaagcccatcagactcacagctgacctcttggcagaaactctataagccagaagagagtgggggccaatattcaacattcttaaagaaaagaattttcaacccagaatttcatatccagccaaactaagcttcataagtgaaggagaaataaaatactttacagacaagcaaatgctgagagattttgtcaccaccaggcctgccctaaaagagctcctgaaggaagcactaaacatggaaaggaacaactgataccagccgctgcaaaatcatgccaaaatgtaaagaccatcgagactaggaagaaactgcatgaactaacgagcaaaataaccagctaacatcataatgacagcatcaaattctcacataacaatattagctttaaatgtaaatgggctaaatgctccaattaaaagacacagacaggcaaattggataaatagtcaagacccatcagggtgctgtattcaggaaacccatctcacgtgcagagacacacataggctcaaaataaaaggatggaggaagatctacgaagcaaatggaaaacaaacaaaaaaagaggcaggggttgcaatcctagtctctgataaaacagaatttaaaccaacaaagatcaaaagagacaaggccattatataatggtaaatggatcaattcaacaagaagagataactatcctaaatatatatgcacccaatacaggagcacccagattcataaagcaagtcctgagtgacttacaaagagacttacactcccacacaataataatgggagacttaaacaccccactgtcaacattagatcaatgagacagaaagttaacaaggatatccaggaattgaacacagctctgcaccaagcggacctaatagacatctacagaactctccaccccaaattaacagaatatacatttttttcagcaccacaccacacctattccaaaattgaccacatagttggaagtaaagcactcctcagcaaatgtaaaggaacaaaaattataacaaactgtctctcagaccacagtgcaatcaaactagaactcaggattaagaaactcactcaaaaccgctcaactacttggaaactgaacaacctgctcctgaatgactactgggtacataacgaaatgaaggcaggaataaagatgttctttgaaacccatgagaacaaagacacaacataccagaatctctgggacacattcaaagcagtgtgtagagggaaatttatagcactaaatgcccacaagagaaagcaggaaagatccaaaattaacaccctaacatcacaattaaaagaactagaattgcaagagcaaacacagtcaaaaactagcagaaggcaagaaataactaaaatcagcagaactcaaggaaatagagacacaaaaaaaccttcaaaaaattaatgtatccaggagctggttttttgaaaggatcaacaaaattgatagaccgctagcaagactaatgaagaaaagagagaagaatcaaatagatgcaataaaaaatgataaagggaatatcatcactgatcccacagaaatacaaactaccatcagagaatactacaaacacctctatgcaaataaactagaaaatctagaagaaatggataaattcctcaacacgtacaccctcccaagactaaaccaggaagaagttgaatctctgaatagaccaataacagcctctggggttgaggtgataatcaatagcttaccaaccaaaaagagtccaggaccagatggattcacagccgaattctaccagaggtacaaggaggagctggtactattccttctgaaactattccaatcaatgggaaaagagggaatcctccctaactcattttatgaggccagcatcttcctgttaccaaagctgggcagagacaaaaccaaaaaagagaattttagaccaatatccttgatgaacattgatgtgaaaatcctcaataaaatactggcaaaccgaatccagcagcacatcaaaaagcttatccaccatgatcaagtgggcttcatccctgggatgcaaggctggttcaacatacgcaaatcaataaatgtaatccagcatataaacagaaccaaagacagaaaccacatgattatctcaatagatgcagaaaaggcctttgacaaaattcaacaacacttcgtgctaaaaactctcaataaattaggtattgatggaatgtatctcaaaataataagaactatgacaagcccacagccaatatcatactgaatgggcaaaaactggaagcattccctttgaaaactggcacaagacaggatgccctctctcaccactcctattcaacatattgttggaagttctggccagggcaatgaggcaggagaagaaaataaagggtattcaattaggaaaagaggaagtcaaattgtccctgtttgcagatgacatgattgtatatctagaaaaccccattgtctcagcccaaaatctccttaagctgataggcaacttcagcaaagtctcaggatacaaaatcaatgtacaaaaatcacaaacattcttatacaccaacaacagacaaacagagagccaagtcatgagtgaactcccattcacaattgcttcaaagagaataaaatacctaggaatccaacttacaagggacatgaaggacctcttcaaggagaactacaaaccactgcttaacgaaataaaagaggatgcaaagaaatggaagagcattccatgctcatgggtaggaagaatcaatatcatgaaaatggcccatactgcccaaggtaatttatagattcaatgccatccccatcaagctaccaatgactttcttcacagaattgaaaaacactactttaaagttcatatggaaccaaaaaagagcccacattgccaagtcaatcctaagccaaatgaataaagccggaggcatcacgctacctgacttcaaactatgctacaaggctacataaccaaaatagcatggtactggtaccaaaacagagatatagatcaatagaacagaacagagccctcagaaataatgccacatatctacaactatctgacctttgacaaacctgacaaaaacaagcaatggggaaaggattccctatttaataaatggtgctgggaaaactgtctagccataagtagaaagctgaaactggatcccttccttacaccttatacaaaaattaattcaagatggattaaagacttacatgttagacctaaaaccataaaaaccctagaagaaaacctaggcaataccattcaggacataggcatgggcaaggacttcatgtctaaaacaccaaaagcaatggcaacaaaagccaaaattgacaaatgggatctaattaaactaaagaccttctgcacagcaaaagaaactaccatcagagtcaacaggcaacctacaaaatgggagaaaattttcgcaacctactcatctgacaaagggctaatatccagaatctacaatgaactcaaacaaatttacaggaacaaacaaccccatcaaaaagtcggcaaaggacatgaacagacacttctcaaaagaagacatttatgcagccaaaaaacacatgaaaaaattctcaccatcactggccatcagagaaatgcaaatcaaaaccacaatgagataccatctcacaccagttagaatggcaatcattaaaaagtcatgaaacaacaggtgctggagaggatgtggagaaataggaacacttttacactgttggtgggactgtaaactagttcaaccattgtggaagtcagtgtggcgattcctcagggagctagaactagaaataccatttgacccagccatcccattactgggtatatacccaaaggactataaatcatgctgctataaagacacatgcacacgtatgtttattgcagcactattcacaatagcaaagacttggaaccaagccaaatgtccaacaacgatagactggattaagaaaatgtggcacatatacaccatggaatactatgcagccataaaaatgatgagttcatgtcctttgtagggacatggatgaaactggatatcatcattctcagcaaactatcgcaaggacagaaaaccaaacactgcatgttctcactcataggtggaaattgcacattgagaacacatggacacaggaaggggaacatcacactctggggactgttgtgggttggggggagggggaagggatagcattaggagatatacctaatgctaaatgatgagttaatgggtgcagtacaccaacatggcacatgtatacatatgtaacaaacctgcacattgtgcacatgtaccctaaaacttaaagtacaataataataaaataaaaaaattaaaaaagattacaagtgcctaccaccatgcccagctaattttcatatttttagtagagatgcaattttatcatgtttttcagggtggtctcaaactcctgacctcaggcgatccacctgctttggcctcctaaagtgctggaattacaggcatgaaccatgatgcctggccaccatttcttaattcttaagagatttggtgataattcctgccgaagaagaactctacaaacctaaaaaacatgtgacagtgcttttaccaacacctccaaattctctatgtataacaataattattgtggtgtgaaaccctagaattatatataatgtgacatagcctttatgtggttgccacacttgattgtaggtaagactgcaaaactcctactgtcatactggcaaaactcctacaagtttgaagaatgtggcaaaacatttaatcagttcttaccccttatttcacaggaaagctattatccttgagaaaaattgtacaaatataaggaatatggaaaaaccattaattcctactcacatcttaacataaaaaggttccttttaataaaagcattaaaagtgcaattactgtcaaaaaaatctttcagaatctataagcctttaaaatgaagaaaagtatttattttgaagacaactattacaactataaagggggttatagcgcatttacttgttgcacacatttgtaccagaggaaaacagtgaagcaattgctcaagctttgttcaacatcagggaatttatgttggagattagtcctgcaaatgtaataagtttagaaacactttttttttttcagaaacaacagcttagaaaacaccagagagtttatactaaagtataattttgcagatgcagtaaatataaaaacaattcaaaatagaatgtatataaatgtcagaatttacagtagaataactaaggcactgacacttaagacattacactaaatcagagtgttgagtataaaaactaatccacaactacagtttttagataaatgatttgtatgtaactttaaaaagatttttggaagcattgtaattacattgaaagtacacttgtttccttgaataaaattttttgaaaactgaataatgatataatacagctttcaaattacttcatgctgttaatttattcctgttttattcacatgtgaaagcatgtgatcaattgctgctgcattagagatattagatatttttaaaaattatttggatattatgaccttttctataaaagaataaggacattaaaatgtaagatgcataatgaaaatataagtggagaggttctttgtagtaaacctctattaagtataaggtaaatgttcagagcaatacttttctacattatagtgtcacaaggaaataattatagttaaaagtatattaaaataaaatagtatattattttactaattgtacttttatgtaatgaaatacagtacatttaaaaattgctagggctgggctcaatggcgcatgcctgtaatcccagcacttggggaggtcgaggtgggtggaacacctgaggtcaggagttcgagaccagcctgaccaacatggagaaaccccatctctactaaaaatacaaaaaatacaaaaaatacttaggaggctgaggcaggagaattgcttgaataagggaggcagaggttgtggtgagccaagatcttgccattgcactccaccctggacaaaaagaaaaaaactgcctccaccccccccaaaaaagttagattatgtgtgaacttaattttattattttttaaccatgttaagactactgtgcatttaatgaagcattattatgccactaactttaaacgatcctaccttactcaagggtgaagctacaagatggtaacaatacacaatttggcatatagtggaataacatttctagtaatcactttgcccgtggctttaaactgcaaatgagttaaagaatattgttcccacagattaaatttgtactctattttcttcttggaatttgttatttgtatttgtgcgtatatagtatgtgtatgtatttatgccttatatggcatcttttgactcaggcctacaatatgcagtaattacattagggtaaataaggtgtccgtcacctctagcatttatcctttgtattaccaaaagtgtaattatatgcttttgttcattttaaaatgtacaattaaattgttattgactacaggatttttttatggttataataattatacaaaaatacaaataaaatatgtccaggtgcagtggctcacgcctgtaattccagcactttgggaggccaaggcaggtggaatgcttgaggctaggggttcaagaccagcctggccaacatggtgaaaccccttctctactaaaaatacaaaaattgaccaggcatcttggtgcacacctggaggctgaggcaggagaattgtttgaacccgggaggtggaggttgcagtgagccaaggtcgcaccactacactccagcatagatgacagagtgagacttcatttcaaaaaaaaaagaaatagaaataaagtccatacatttctgagtcctgaaagtttattaataaatatttgttacatagctgtctttgaacatgtggtctctctgcctgcaagcatatagacttttagttttaatttacatagggttaaatatactcatattactctgaagataaaccttaggtgtatgaaaattatgaagcgagtgtttttgtgagtatgagtttgtacatattttcagaaggaaagagcaattattgcaacaaaacaaatcattttaattagatgattaacaaaactaaacaccttgaaaatgctaaaagcaaatctatactttctggtttgtattcaatttattagtgtaaaatgttatggcttatgattcggattctccccggaatctgcttattaaagcacaggcaactttgtctccagaaccaacactcttgaatacaacaataaaacccctcttcaaacaaacaaaaaaatcattttaacacctattttaatgaacattcaaccagaattgaataattgaatatatttttattgttctatgtgtgtgtgaacatataaaatggtgcataaaggaaaaatgagccagaaaaaaatgttagttaagatttgtagtgaataaaactggaaagtagttaattattatatccagttgatatctttgtttatgtagataacaaaagcagcagaaagacttttttttttctttttcaagatggagtcttgctctgtcacccaggctggagtgcagtggcgtgatagcccactgtaacctccacctcctgagttcaagcaattcttgtgcctcagccattttagtagctgggattacaggtgtgtgctaccacgcccgactaattttcatatttttagaagagacagggtttcatcatgttggccagactggtctcaaacagctgacctcatgatctgcctgcctcagcctcccacagtgctgatattacaggtatgagccactgtgacaggcaaaagactattttaaaagtttatttatgtgggtagacaacgttctaagataataccctgaattcccagtctgttacacaccagctgtgtaatactttcttcttgagtgtagaaacgtgtgactgtggtaggaaatcactcatgaaattaggttactcgtgttgcctttgtgtttatcaaaatggagattatcctgcttgtgctaaacttaatcagatgtggttttgagagaaagagacacgtcatagaaaaacacccctgctggcctgaaagtaagtgacttcttggtggaacatgttgtaagctgcttatggtggccacataacaggaaacatgtttgtatattgtcatcattcctgcctcctgcatgttgatttcagtaaggagaataagaggatcttatggcagagggtaaaaaagggactttcattcatgcaagaaataatcacctctcatctgggatagcttaagagaaacaggagaccacaacaggaccacattaatggtaggaaaagggtaccctgagtaaaagtgttcactggcatcatagaacaatatttagtaagctgtagtgaatgatcagcctctgggatactgatagtttaccaacaatgctgaactcattctgttttaatcagcatgtctgcaccattctggtgacccagttttatagtattcattacagaaataccatgaagaccagtgggtaatgtcctagaattgtacttatttcaaaaagcgtacctaattgttttcacatttcaaaaaccttaaaagcaatgaatttataattaacttctaactatagaggattctactatactgtaatacaagattaaactgtaaacaccttaatatgaatattttttgaatgtatgattagttagtagacagtttcttttagagtcacaggacaaaataacaactagagaaaacatttgaaatgggataaaattaaccaaaaccacatcttttcaatggcttggctaaactaaacaccttgaatattgtcatcttttcaatggcttggcgtaattgccatacttacggaaatggccagatgactaatgagaaacaggaagattttggctttgctcaatgattgtttttgaccttttgaaatctaaaatcctggctaaactattcaaagggaatattttataggtggcttcccagggtttccaagtaaatgaaggatggattctctctctgtcacccaggctgcagtgcaatggtgtgttctcatttcactgcaaactctgcctccctggttcaagcgattctcctgcctcagcctcccgagtagctgggataacaggcaaccaccattatgcccggataatttttgtatctttagtagagatgggatttcaccttgttagccaggctcatcttgaacagctgacctcagagtgctgtgactgcaggtatgagccactgtgcccggccagaagaattttgataggcaggaaaatgcacattatatacacacattgctctactctgatttacttcaacactgaaaaattgaagattgtaaatgtagtctcaatttagagtgaattaacaaaagatttgtttttcaaaaaagcaaatggataaaattaatgggtaacagatgccattagctgctaaaaaatagtatgactaaatttagtaagtatctagctatgcaaataacagcccaattaaattaagaccctaataggtgcatgtggaaagcattgatgtgcagtgtggtgcacctccactcagcattttcttctacctttttacagagataccaattcttcctcagttactcagggtccatactgggttagaaatgcttgttctctggtgccataaggaaatagcactcgaacattaattttcttagcaaggccatttttactttttgcggaaagtgtgcactcttcagcagttttgccatcaaagtacatcaaacaaaggagacaaggtcatttataacctgacgcatcctttctactgctgtgtctagttttcattggctgaaacaagacctcaaattctgtatttccccccattgtttagcgacttagaactttttaaaagaggcaaaggcagaggagaatgaaggaaggaggaagtaacttgtggaatgctgagaaaggtaaaaacaccaaataaggaagagtaacaggctatgacctaatgcttgcttggactagtataagcatgccagggcaaatatttaggctaaattgtgggagctaagaagaaagtacattgatttttttattatggctggcagatatttaagaatgttagcacaggactttgaataaattttgcttctaagagaagttactgtttattcctaattagatggggaggaaagtctttgaagaggaacctctactttactttttgcacttggaacagagagtgctgtgttcagagtgattaccgaaaacatggctaatacacatcttccatatgataataaaatgttataaatcttactctgcctcagaaaagcttttactaaaagattatctatggtaatcaatttgagttcatggaaaatttcaatattccacataattcagacagttaaatgtcaatgaaatctcaaaacatttgaataagataaagtcttcttagtgaagaattttatattaccggtagttagaaaaaaaagaaaaccaggctgaatgcggtggctcatgcctgtaatctcagcactttgggaggctgaggcaggtggatcacctatggtctagagctcgagaccagcctgactaacatggtgagacccccatctctactaaaaatacaaaaaattagctgggcatggtggcaggtgcctgtaatcccagctactggggaggctgaggtagaagaattgtgggaaactcggggacagaggttacagtgagccaagatcatgccattgccctccagcctgggcaacaagagcaagactccgtctcaaaaataaaataaaataaaaaccagtaccttaagccaaataacattgtttgacatgggagtagcaaccaaacaagtgctattcatgatttcataataactttttttttttgagacagtctcactaggtcacccaggttggagtgccgtgacatgatcttggctccctgcaacctctaactttctggtttacatgattctcctgcctcagcctccctagtagctgggagtacaggtgcccaccaccatgcccagctaatttattttttttttaagaggagtcactctgtcatcttggctggagtgcagtggcacaatcatggctcactgcaaccttggcctccaggttccagcgattctcctgcctcagcctcttaagaagctgggattacaggcacctgccaccacgcccagctaattttttatatttttagtagagaccagatttcaccatgttgcccaggctggtctcaaactgctgacctcaagcaatccactgccctccacctcccaaactgctgggattacaggcatgagccattgtgctcagcaatttctgtacttttagaagagacagggtttcaccatattggccaggctggtctcaaacttctgacgttgtgatccacccacctcggcctctcaaagtactgggaatacaggcatgaaccaccatgctcggcctgatcattgttaaagtagcaatagcaccttgtgctttcctaggacttgctggcctgtttttcactgatataaagtgaagaaagcattcaaatattgctgagaagtggctgtcctcccagaaaatagctattctcggctgtaccaacattgactaatagtaagaggaagtgaagtggataaaaggcaaatgtgtcttctctgtatcttttttcaaccattggctgaagaacaggagaatgcagaaaattaaaaaaaaaaaatccctgaaagatcatgaagaagctctctttatcagacaaaaaacctcttaggggattttttttgtttcattattgtactgtctgcttctatgagtttaaatttttttttacactttacatagaaataggattatatgagtcaggcacagtggctcatgcctgtaatcccaacactttgagaggccgaggtgggtggatcacttgaggtcaggagtttgaaactagcctggccaacataggaaaactctgtctctacagaaaatataaaaatttgctgggtatggtggcaagtgcctgtaatcccaggtactgaggaagctgaggcaggagaatctcttgaacctggaggcagatgttgcagtgagtggagatggtgccactgcactccagcctgggtgacaagagcaaaactccacctcaaaaaaaaaaaaaaaaggattatgttttctgtttttttccgtgttgacttattttacttagtataatgtctttcaggttcatgaatgttgttgcaaataacaagaccttatttttaagggctgaatagcatttcattgtgtacacataccatattttctttttccattcacctattgatggacacttaggttgatttcataccttagctattgtgagtaatccacttccttccttctattttgattttgtttttgttttgctttgtttgagatggagtctcattctgtcgcccatgctggagtgcagtggcgtgatctctgctcactgcaaactctgcctcccaggttcagtgatactcatgcctaagcctcctgagtagctgaggttacaggtgtaagccaccacaccaggctaatttttgtaattttagtagaggcaggctttcaccatgttcaccaggctgcctttcatttgtttgtatatttctttctcctttcccgtctttatctctagaagtattttaattttaatatataaattatgactgttaaccttcatttctctgtttttgcatactattatggctgattaaaagataagttttttgaaatttcctggataaagtttattacttcattattaagataacttgagacaatatggaaatgaaaatcaacatttgttagtaaaacagaaattagctactggtagtcatttaatctctcacccaacatgaacgctacgtctttgtgtcatctctcccagttgtatgtaagaggctactgagcaaactggtcagcataaaattttgtgaagtttaacatatatgttctgaaaattaagttgatccattaccagaaaagtaggttttctgatgtgtataattttactctatttaaattcttcagaaaaatgaaactgacattatgtaaaagttttttttggaaattaaaaatgcttaagaaatatttatagaaactaaaagtaaaaatagttttagattcctagagaacatctttaaaatacttcaagttatcttctgacactatatatatataaaatatatataatatataaatatatataatatataataaatataatatataaaaataatatataatatataatgtataaaatatatatttacattatatattatatataatatgtaatgtataaaatatatatttacattatatattatatataatatgtaatatttatatgtttatatatttaaatatataattatatttaaattatatatttaaatatataattatatttaaattatatgtttaaatatataattatgtttaaattatgtttaaatatataattatgtttaaattatatgtttaaatatacaattatgtttaaattatatgtttaaatatacagttatgtttaaattatatatttaaatacacagttatgtttaaattatatatttaaatatacagttatgtttaaattatatatttaaatatacagttatgtttaaattatatatttaaatatacagttatgtttaaattatatatttaaatatacagttatgtttaaattatatatttaaatatacagttatgtttaaattatatatttaaatatacagttatgtttaaattatattttaaatatacagttatgtttaaattatattttaaatatacagttatatttaaattatatatttaaatatataatttaaatataaaattatatttaaaatataattatatttatatactacataaatatatgatatatcatatataaatatatataatatcatatatgatatatatctcatatatgtgagatatatgatatatatctcacatatgagatatttatgatatatctcatatatatgagatatttgatatatctcatatatatgagatatttgatatatctcatatatatgagatatatatcatatatgatatatattatatactatatatcatatatgatatatatttatatattatatataatatatagaaatatataatatataatatatatcatatatatgtaaatatatatttaatatatatgtatatttatatatgaatatatattttgtatatgtaaatatatattatatataatatatatttttatataatatataatatattatatatgtttttatataatatataatatattatatatatttttttctttttttgagacaaagtttcactcttgcccaggctggagtgcaatggcacaatctcgcctcactgcaacctccaccttccgggttcaagtgattctcctgcctcagccttgccagtacctgggcttacaggcgcccaccaccacacctggctaatttttacagttttactatagatggggtttcatcatgttggccaggctggtctcgaactcctgacatcaagtaatccctctgccttggccgcccaaagtactgggattacaggcatgagctgctggctgggtcaagtgttgaacttttctgaataaattatctcagctcagataatttaagtcagccaattagcttacctctggggattccaagcagcccattagcacatcccaggagaatccaatcagcaaattagctcagcccagctgattagcccaggtaatttttaagagccagctaacttactccaggtgatattaatcagccagttatctcagctgatgtgaatcttataagccaattagtttagcacaggtgattttaaaccaccgcgtcactcagcccaggtgatttcaatcagtgaatcagcttaacccaggtgatttctatcagccaattaatcaatccaggtgaattcaattagctaattagctcagtccaggtgatcccaatcagccaattatctagcagctgccaattcattaaggcatgcccaaaatggtaaatgtaaatagcccaggcacaccaagaagaaatgcagggccctatatgctaagctggacagtatgtaccatacagctttactgtcagcttatttacaagacctgaaacctgaagctgaaggtttttgtttatataaaccacattgtatggctatgttttattctgttatgctattgaaaaaaacagaaggcaattaattctacatctgcatccttagtatatgctctatattttaaaaagtgggaaaatattttatgtatacattatttacatatacacattcatataagtttgcgtttatgtatctaccaggtgtgtacatatattcatatatatacctaagtatatataaatatatatataatatctgaagctgtaacaatctttgtatttatattcatacagaataaagatgttgactgtggaagtattgataggtattgctacaaacagtaatacaaaacctttcatacatgcataaaatattttccctgtagaatactatttctagaatagtacagaaatagaggaatgctctgatatacatcctgctgcacttaatatattcaaaggaagcactgaactttgttgtgcacttctggatgatacaaattttctaaggccattggagttatttactgccatatcagggttgacttttcttttattgttgtacgtaaggtcagagatgaaccagccccagtccaaaggttctaacctaaatatgagaatacttactctttctctttagaactttcatcaagacaagaactgtgtgtattcccaagagtgtgtgatgtaaaatcacactcttgtctttttgtctttgtggcagaagttgggtatttatggtaagaaaatattagtctaggtctctttttagaagacagatggtgatcatggaagcaaatataatggtacatggtacttggccacatttcaaatgggtgatagtgaacattcgctgaagtgtcacaggtggctctatttgccaggtcaaatctttgtgaggaaggctcagcccactggtgtcaagcatttctggcagtttccagaaagatgaaaagaagctcaccgggctggtttaatgagaccagaattaaaaacacccaggagccacattattaaacacatttttacatttatttaaaaaaatgtggtgtatggcttggtttgaataaatcttcactgagctcagtagctgattgaatttatctaacctgttcggaaagaaaatggaaataacctctgatcaagtttattttataggcttctttctttacatacagatataaaataggtggctcgttaaacatatacacacaaaatgagccacatggttatgtctatgtaatgtttatttctgcatacgactctcaaaaaaaagccacagaaaaaaagtaggtcagaagacatctccatatgctacccctgaagccaagatcaattaaataagtaaatgagcagaaaccgggtgattgcaatcagccaatttgcacagccttggtgatttcaaccagccaaggagctcagtccaggtggatccaatcatccaattatctaaatggtgactgtgactttgtcaagacaggcgccaaatggtgcatgtgaacggaacatgtaccaaatgcagggcgctgaaatactgtcctggacagatgtgttacatgactttattttcagcttatttctgtggacttgcccttgaagatagagctttgttgatatgttccattctgaaatgttatttagctaaagaaggaaaaattgattctacattagcgtctttagagcatgctaaaaggttaaaaatatctcttggggaatatgttttgtatacataaatatttagatagaaatatttatataattctctatgtgggtttttgtcttcctatgtatatatgtagatgtgtcaatctttgtattgatatgaaacgttgtgaatagtgagataaaaagtaacttccagttggatgctgtggctcacacctgtaagcccagcactttgagaggctgaggtgggtggatcacctgaggtcagaagttcaagaatagcctggccaacatggtgaaaccttatctctactaaaaccaaatctacgtctgattgatgtacttgaaagtgatggggagaatggaaccaagctggaaaacactctgcaggatattatacaggctcaaaataaagggatggaggaagatctaccaagcaaatggaaaacaaaaaaaaggcaggggttgcaattctagtctctgataaaacagactttaaaccaacaaagatcaaaagagacaaagaaggccattacataatagtaaagggatcaattcaacaagaagagctaactatcctaaatatatatgcacccaatacaggagtacccagattcataaagcaagcgttagagacctacaaagagacttagactcccacacaataataatgggagactttaacaccccactgtcaacattagacagatcaacgagacagaaagttaacaaggatatccaggaattcaactcagctctgcaccaagcagacctaatagacatctacagaactctccaccccaaatcaacagaatatacattcttcttagcaccacactgcagttattccaaaattgaacacatagttggaagtaaagcactcctcagcaaatgtaaaagaacagaaattataacaaactgtctctcagaccacagtgcaatcaaactagaactcaggattaagaaactcactcaaaaccgctcaactacatggaaactgaacaacctgctcctgaatgactactgggtacataacaaaacaaaggcagaaataaagatgttctttgaaaccaatgagaacaaagacagaacatgccagaatctctgggacacattcaaagcagtgtgtagagggaaatttatagcactaaatgcccacaagagaaagcaggaaagatctaaaattgacacgctaacaccacaattaaaagaactagagaagcaagagcaaacacattcaaaagctagcagaaggcaagaaataactaagatcagaacagaactgaaggaaatagagacacaaaaaacacttcaaaaaaatcaatgaatccaggaggtggttttttgaaaagaccaacaaaattgatagaccactagcaagactaataaagaagaaaacagaagaatcaaatagacgcaataaaaaatgataaaggggatatcaccaccaatcccacaggaatataaactaccatcagagaatactacaaacacctctacgcaaataaacgagagaatatataagaaatggataaattcctcaacacatacaccctcccaagactaaaccgggaagaagttgaatctctgaatagaccagtaacagcctcgggattgaggtgataattaatagcttaccaatcaaaaaaagtccaggaccagatggattcacagctgaattctatcagaggtacaaggaggagctggtactattccttctgaaactcttccaatcaatagaaaaagagggaatcctccctaactcattttatgaggccagcatcaatatgataccaaaacctggcagagacacaacaaaaagagagaattttagaccaatatccctgatgaacatcgatgcaaaaatcctcaataaaatactggcaaactgaatccagcagcacatcaaaaagcttatccaccatgatcaagtgggcttcatccctgggatgcaaggctggttcaacatacacaaatcaataaacataatccagcatataaacagaaccagtaacaaacaccatatgttatctcaataggtgcagaaaaggcctttgacaaaattcaacaaccttcatgctgaaaactcttaataaattaggtattgatgggacatatctcaaaataataagagctatctatgacaaagccacaaccaatatcatactgaatgggcaaaaactggaagcattccctttgaaaactggcacaagacagggttgccctctctcaccactcctattcaacatagtgttggaagttctggccagggcaatcaggcaggagaaggaaataaagggtattcaattaggaaaagaggaagtcaaattgtacctgtttgcagatgacatgattgtatatctagaaaaatcccattgtctcagcccaaaatctccttaagctgataggcaacttcagcaaagtctcaggatacaaaatcaatgtgcaaaaatcacaagtattcttatacacaaataacagacaaacagagagccaagtcatgagtgaactcccattcacaattgcttcaaagagaataaaatacctaggaatccaacttacaagggacgtgaaggacctcttcaaggagaactacaaaccactgctcaacgaaataaaagaggatacaaacaaatggaagaacattccatactcatgggtaggaagaatcaatatcatgaaaatggccatgctgcccaaggtaatttatagattcaatgccatccccatcaagctaccaatgactttcttcacagaattggaaaaaattactttaaagttcatatggaatcaaaaaagagcctgcattgccaagtcaatcctaagcaaaaagaacaaagctggaggcatcacactacctgacttcaaactatcctacagtgctacagtaaccaaaacagcatggtactggtaccaaaacagagatatagaccaacggaacagaacagagccctcagaaataatgccccatatctacaagaatctgatcttttgcaaacctgacaaaaacaagaaatggggaaatgattccctatttaataactggtgctgggaaaactgtctagccatatgcagaaagctgaaactggatcccttccttacaccttatataaaaattaattcaatatggattaaagacttaaatgttagacctagaaccataaaaaccctagaagaaaacctaggcattaccactcaggacataggcatgggcaaggacctcatgtctcaaacaccaaaagtaatggcaacagaagccaaaattgacaaatgggatctaattaaactaaagaccttctgcacagcaaaagaaactaccatcagagtgaacaggcaacctacaaaatgggagaaaattttcgcaacctactcatctgacaaagggctaatatccagaatctacaatgaactcaaacaaatttacaagaaaaaaacaaacaaccccatcaaaaagtgggtgaaggacatgaacagacacttctcaaaagaagacatttatgcagccaaaaaacacatgaaaaaattctcaccatcactggccatcagagaaatgcaaatcaaaaccacaatgagataccatctcacaccagttagaatggcaatcattaaaaagtcatgaaacaacaggtgctggagaggatgtggagaaacaggaacactttcacactgttggtgggactgtaaactagttcaaccattgtggaagtcagtgtggcgattcctcagggatctagaactagaaataccatttgacccagccatcccattactgggtatatacccaaaggactataaatcatgctgctataaagacacatgcacacgtatgtttattgtggcattattcacaatagcaaagacttggaaccaagccaaatgtccaacaatgatagactggattaagaaaatgtggcacatatacaccatgaaatattatgcagctataaaaaatgatgagttcatgtcctttgtagggacatggatgagattggaaatcatcattctcagtaaactattgcaagaacaaaaaaaccaaacaccacatattctcactcataggtgggaattgaacaatgagaacacatggacacaggaaggggaacatcacactctggggactgttgtggggtggggggaggggggagggatagcattggaagatatacctaatgctagatgacgagttagtgggtgctgcgcaccagcatgtcacatgtatagatatgtaactaacctgcacattgtgcacatgtaccctaaaacttaaagtataataataattaattaattaattaattaaattaaatttaagaaagtaaaaaaggaaatgagggaaatatactactaaaaacacataaaacaataacaatataactggcaataacaacttcatttctttaagcaatcattttaaatataaattaattaaactatttaataaaatgaaatgtaatcgtaggactttgtaaggccaaggtaggctgatcacttgatcccaggagttcaagagcagaatgggcagtatggcaaaactctgtctcagcaaagaatacaaaaaaggtagctgggtgtgatggcacatacttgtaatccagctacttgagaggctgaaatgagaggatcatctgagtttgggaggttcgggcagcagtgaacccagcaaatcaacctggttgacagagtgagaccctatctccaaaatacacgaggctgggtgtggtggctcaggcctgtaatcccaacacgttaagatgctgaggtaggccgcctggtctctactaaaaatagaaaaaaattagccaagcatggtggcaggttcctgtaatcccagctacttgggaggctgaggcaggaaaatcgcttgaacctgggaggcagaggttgcagtgagctgagattgcaccattgcacttgtccagtctgggcaacgagcgaaactccatctggaataaaaaagcaaagaatttataaataaatacaattatatgaagaaaaaatagaatgcctgattggtttttttataaagcaaacaatatgctccctacaagagactcattttagcattgattcaagtaggctgaaagtaatagaataaaaaaagtatattccatgaaaatagtaccacaattgagtgaggtggtcataattatattagacataatatgctttaagtcaagtactgccatgagacaatgactgatattatattatgataaagtgagttgatttagcaggaatctataactatttatctatctgcatatgtgtatataacatcagagctttaaaatatataaagcaaatattgacaaaagtgaagcaagacatacataacaacataataattgtagacatcaagaccccatttgcagtaataaatagaaaattaaggtaaaaataagaaacagaaaactaagacattatagactatattaactattttgcatatagaggaatacttgagagtgcataatttataaagaaaaaaggtttatttggctcacagtttggcagactgtataagtgtgtgccagcatctgcttctggtgaggatttcaggaagcttaaaatcatggtggaaggtaaagagtaactggacatattatatgataagagacagagcaagtgtgaggtgaaggtgccagattattttagtgaaccagttttcatttgaattaatagagtgtaaactttttggttaccaagaggttgtacgaagccattcatgagaaattttccccccgtgacaaaaacatgtcccaccaggtcccacaatcaacattgaggatttacattgcagcttgaagtttggagaacatggacgtccaaataatattatgaacgaactaggcttcacagacacatacaaaactctccagtgaaaaccaagataatacacaatattcctatttgcacctgatgcattctgttaggacacagcaagttttattaaatttaaaaatactaactgggtgcagtggctcttgcctataatcctaacactttgtgataccaaggtaagaggatccattggtgccaaatgtttgagactagcctggacaacattgtgagatcctaaaactacaaacaagcaaacaattatccagacatggtagtgcatgtctgtagtcctaactactcagaaaactgaagtgaaaggatctcttgagcccaggaggctgaggctatagtgagccaaaattatgccactgcaccgcagcctgggatgcaagatgttgtctcaaaacaacaacaaattacgttaagaagactaaaattatacattgcgtgttttctaacaaaaactgaatgaaactaggaattaaaagcaaaagtcaaactggcatattcaaaactatgtgaatatgaaacacactcttcaacatattcttgctctgtgtcaaaaaatgtcatttttcaaagatgtcaatccaacctacagttaaaagctacagaacataaacagtgtgatattgacacaaagattaacagatgaaagaacaaaatagagttcagaaatgaacccttctatatatgatcaaatgatcttccacaacgttgccatgagcacaaaacagagaaaaataatctcttcaaaaaatgatgttgaaaactgaatatcaaaactgataaaaaagttggattatttccttgaattaaaatatattttaaataaaatgcttggacataaaaaaactaacaaatcttttagaaaaactacggaaaaaagacatgacattggtcttggcatcattttcttagctacaaaattaaatgcatgagcagcaaatgaaataacagaaaagtttaactacactagacttcaaaatttctgcataccaaaaaacaattcaagagtaacaacatcccttagaaaacgggtgaaaacatttgcaaatcacatgtgaaagaagttaatattcaaaatatataaacaactctttaaacaataaaattgaataacttgatttagaaatggacaaaaaatttttcattagacaagtacacaaatgggaaaaagcatttgaaaggacacaaaaaattactaacttgtaaagaaatgaaaaaaaaaacaaaaaaacaaaaaaaaccactgacaaacaaaatcacctcacacccattaggaggaccactacaaatatttttaaaaacatcaaatctgttgacgatgcaataaaagtgaaacccatgttaattgttggtggaaaacaaagatgcagccattattttagaaagttacaaatgctcctcatttataagtctatatccaaaatatgtaacaaaggccaggtgcagtggctcaagcctgtaatcctagcaatttgggagtccaaggggggcagatcaactgagatcaggagtttgagaccaacctgatcccttctctactaaaaatacaaaaaattagctgggcatcatggtgggaacttgtaaccccagctacttgaaaggctgaagcagaagaattgcttgaaaccaggaggcagaggttgcagttagctgagatctcaccactgtcaacagcctaggcgacagagcaagactccatctgaaaaaaaaaaaaaaaagcaacacaggatatgggaggcatatttgaaaatccattttattgcagcagtattcacaaaagccaaagggccgaagcaataacccagatgtctcttgatttataaacatatcaaaaaatgtaacctatacatacaatagaatattattccaccttcaaaaaaatcttgttacattttaagatgaacattgagaatcttatgtcacctgaattaatctagtaacaaaattatggatactgtaccacttatgtgagatatcttaagtagtcaaaatcataaaaacagaaaatggaaggtttgtcaaaagctggagagagggtaaaatgagaagttgttacttaatgagtactgagttttagttttgcaagatgtaaagtttctagaagtcttttgcataacaatgtaaataaacttaacatgcctgaaatgaaaagcttttttttttttttttttgagacagggtcacccgagctggagtgtagtggcacaattcaatctcccatgtagctgggaccacagcttcacaccaccatacacggctatcattaattttttctttttatagagaggggtctccctatgtttcccaggctggtctcaaacttttgggctccagggatcctcctgtcttggcctcccaaaatcttgggattacagatgagagccacaaccatgcctggccctgaagtatacacatcaataaatttaagatggtaaatattatgttatgtgtttttaaaacaatgtttatagagaaaaactttaaaaaatccagaattataaatctttttggaaattaacttcaaatcacaaaagtgtttctctcacaaaaagaaatatatattaatcattaaacacatggtgaaaataaggctatctccatgactactcagacaagataaaattaccatcgaaaattagctgagagaatatgaaataagccataactaaaatttgggtcatatttataggttagcacacatacacatgtaatccggttgtgatagacatgcgcaatttatttcttagataaaactcatattgacttaaatatacaaacggaattgcaaattgtctaaaattataatacgtaagtataaccaatagacacaataaactgatgttgggaaacctacaccgaggctggactcggtggctcatgactataatcccagcactttgggaggctgaggcaggcgtatcacgaggtcaggagtttgagaccagcctggccaataaggtgaaacactgtctctaataataatacaaaaattagctgggcttggtggcgtgcctgtagtcccagctactcaagaggctgaggcagaagaatggcttaaactcggaaggcagaagttgctgtgagctgagactgtgccactgcactttagcctgggtgacggagagagactccctctcaaaaaaaaaaaaaaagtaataaataaatctacaccggagaaactcactaacatagaacttcaaacaataataagagaaatgtttgctcataaaatctggtatactacattgatgtatcatcaaacaaaatttgtcaggcagggtgtagtgattcatgcctataatctcagcactttgggaggccaagggggacagatcacctgaggtcaagagtttaagaccaccctggctaaagtggtaaaaccacatctctactaaaaatacaaaaattagctgggcatggtggcacatacctgtaataccagctacttgggaggctgaggcacaagaattgcttgaacccgggaggtgaatgttgtagtgagccaagatcacccgacggcaatccagcctgggtgagaaagtgtaattgcttctcaaaaaaaaaacaaaaaaaaaaaactatgtaactgcaatatttagctgttactatgtactcatcatatacaaatattttaaatcattggcatgcattgtgtggcagtaaaatttcagagaatatgcagtataattataaatagaagattctaaagagaaacaataaattagcattttaaagaaactagagttgctttttatgttttaaatatatgctattgttaaacaaaatgaaactgctgtaatccaactttaaaaggaaagaatagccttacgttgttaagtacagaaaaagatatatattttgcagaatatggttaggccctctcatatgtgaaacaaatattaagaaataaactatgttattatttagatatagcctgaaataagtagatgaaaatcctataattcctttttgcctgtatcaaacttaaacttatatgtaaatgttttagtaaatatggagtgcctattaattatctaatttacttgaggcataccatgcaaattctagcatattgtcctaaatatctgaatctaaaattacagaaaaatttgaaatagaaaatagaaagtaaaaatgtataaggagagtgacatcagtaagataaaaagattaaaagtgccctattttcatattcccttacagcaaaaaaagtcagccatccctgacaaaaatgcctttatgagagaacagggcattattgctcacatctataatgacagcttcatggtacattaggttggaaaactgcttcaggtgaggattttgaggccagcctgggttatgtagcaagatgtcatctcccaaataagtgcctctaagagagatgtgagatgcagggacgcagttgtgaaacgatgttaaagcttaagtttgagaaggattctattcggaaggcaggccctcattcatgtgggatactgcaggactcctgttttagctacagaccaggatagggttcacccaacttggttccactgagaattctaaacttactctgtaaccatcccaaactcctcccagccacagtctggcagaggtcctgctattccagatacctggaggaaggtgcccatttacatccatgcaggcaggcctgcagatctgggcctttactggggtcactgaggcagttcaatgactcagtttcagttacccgagccactgtttatggtcagttctccctatatagaaacccacacagttacctgaggaaatgctctctggtactcactgaaagccatactcatcaacatcctgatacaaggtccaccatatgcagaccgaactgcaaaaacttgccctagtgtttgccctatggagcaaagccctgaaggatattcagtctgtccaaaaatgaaatgggaattacaactacccaagcccctgtaacaagccaactaaaggtgaaccctagttcagacccagcagccttgtgaccaagctacaacccctcttcactacaaattcagagggcatctcatcaccctaagggcccaacaaaagatctttaccttctgaaatcagtttatgaaaatttaaagtggtgtttgctccatcaaattcagacacaaataccaaactatattctgtccattgtcaatgcttctactttaatgtagcactggaagtatgtggcagaagaattagtcaaagaaattttaaaaatccattaaaattgaggaaaaataaataaaaaattgctgcttgtagatcatataatcttatatttaaaaacccataaagagtacattcgaagctgtctaaactaatacatacactcagtaaattagcaaaatataaaactaacatacaagcatatgtacggttttatacacttaaactatctgataaaatagaggaagaaaaaaatcttatttactatagcattaaataataaatttctgagaaaaaaattaaccaaggaagtaaaaaatctttactaaaaaaatgaaaaaattagaaaagttataaataaattttaaaatattttatgtctatggattgaaagtataaatattattaaagtgccatattattcaaagtgatctatagattcaataaacttcccattaaaattgcaatggtatctttttgacagtaatgaaaaatacaattctgaaatttacatgaaactataataagctttgaattgccaaagcaatcttgatgaaaagaacagagcagaagtataagcaaaacttatacttttgaagtctatttcaagattatatagtaataaaaacagaatggactgtgcagaagactgagcaagaaaaattcaacagaaactactactctcacacatttcagacctatgcaaaaagagaactttgagaatagttttagtttctcaaaaaaaatcagatatttgtgtccccaaaacactggaaaagaagccagattatgcagcctcttatatgctgtgaagtggactttggctctcactgtgaacttgaagggagctcactgaaagaaaagaagaattcttaaagaatttaaaagcatatgacagaagtgtcactttgtgagagaaaaattaaaacaaaaacaaaaacagctgcccaggactatttcctttggaacacagcttcccaaaacacattttaaggactggctttctctttaaccttgggatctcttatctgtgccatctgttgcattcgttttcactcgcacccaccttggtgtttggcaatcatctcatgtctcttcatagttttttttcttattccagacaggtgatcaggtctggcttagagacaacaataactgttttattaaaaataaataacatgaatctttctcatattctccaattacaagctagtaatgtgctcagcagagaggatgtaatacaatattctggtaaattaataccaaaatactaacttataacagaaatttctaaatatttagaaaatactttcaaactgtaggtttctttttctttattttttaattttttttatttttttgagaccgagtttggctcttgttgcgcaggctgaagtgcaatggtgcgatctcggctcagtgaaacctctgcctcccgggttctaccaattatccagcctcagcctctggagtagctgggatttcacgtgtgtgccaccatgcctggctaattttgtatttttagtagagatggagtttctccatgttggtcgggctggtctcgaactcctgacctcaggtgatcttcctgcctcagcctcacaaagtgttgggattataggcgtgagccactgtgccaggtcctgcacgtaggtttttaaattttactacctgatactactgaatcaaaacttggtgctggcagttagattttcaggtgggagcaaccatattttatgccaaaatttcgggaattaccacaaatttagagtgaagaatacagctcaactcaggaatgtggaaagtttggattaagatgaaatatcttgaagaaattcttttctaaatgaaaaaattctgaagattttctgggaaaaaagcattctgaaactctttgatgcaaagaataaattactaaaaaacactccacaagaaaagataaataaaaccttcagggtatgttacgaattatgtattaaggttatcctcaccaagaaagacaaggtttctgtagttctctaacatcatatccctatataaatttcactgtgcagtatccagacaatgacactccttcagagagaattctatggccacatctctaaattgcaatggcccctgaaacacacacacacacacacacacacacacacacatatttttaccaagtggccgtgggcggagttgttattttgacttaaggtgaaattggaaagtaaagagaactggttcttacttataggactgactaaaattatccaataaaataattttcaacacagaaatatgctctaatgtattctttaactctgagaaagaggagcagcgtaagatccacaacatcattacatatatgatatttttctaggtaacgaagtataaaattaagggattgaacatgaacatgtacatttttgagggcaacatccacctactgggctcaagtgattctcctgcctcagcctcccgaattctgttactacaggcttgtaccaccatgcctggctcattttttttttttttttgaatttttagtacagatggggttgcaccatgttagccaggatggtctcaatctcctgacctcgtggtccaccagcctctcaaagtatcgggattacaggagtgtgccactgcatctggccacaagcattttcttaatcctgctctgcatagagctaatggaacacacagatggagcctcaacattacatgttttccatctttactaaggaccacagtttttcccaagagaaatcttgagtatccacaccttctcatgttcaacagccataaagggaacatttttaatattgcatattggaaacaactgctcagagtttcagagtaagtgagcactcaaatcgagaacgttgaagcaaggcaaatttacttctatacaaggctgcatctcacaggtggagaaatagcaagagcacaattggacaagggaggggaagggggtcttatcccttacaccgctagtccttagtgatgtgtctttctcctattggctagggttagaccgcacagtcttagctaattccaattagctattttaaagagagcaagggtggcgaggtgagtagtttcagcaggaaggatggtcacaaggcatttgactgggggtgactcagaatagagcaggtaactagggatgattcacagcaggtgactaggggtgactcagaacagattaggtgactggggatgagtaaggaccctaaatatgtgagttagaagggggttgcttactgaaactaggggcaaggagacataaagattgaggaatttaaacattaaaatggagaacaaagaacagggaagctgataatactgaaatattggttctttgaagaggacttcagaactcattgtacttaacgattttcctctcttggattttaaaggaagttaagctgaaacctttaaagagatatttactgtatcctacatttcagatcataaattcttgctgagaattctgcatggcatataagaagctacgacatagaaaatgtagagaaagttctggaatataggaaataaatatttttcggagacccttgactatcataagtattttaagaagaactcaaactgagaatagggggtggagccaagatggccgaataggaacagctccagtctacagctcccagcatgagcgacgcagaagacggatttctgtatttccaactgaggtaccgggttcatctcacaggggagtgctggacagtgggtgcagcacacactgtgtgagccaaagcagggcgaggcattgcctcacccaggaagcgcaaggggtcagggaattccctttcctagtcaaagaaaggggtgacagatggcacctggaacattgggtcactcccaccctaatactgtgcttttccaatgggcttcacaaacggcaggccaggagattatatcccacacctggcttggagggccctacacccacggagcctcactcattgctagcacagcagtctgagatcaaactgtaaggcggcagtgaggctgggggaggggtgcccgccattgctcaggcttgagtaggtaaacaaagcagcctggaagctcgaactgggtggagcccaccacagctcaaggaggcctgcctacctctgtaggctcaacctctgggggcaggtcacagacaaacaaaagacagcaataacttctgcagacttaaatgtccctgtgtcacagctttgaggagagtagtggttctcccagcacacagcttgagatctgagaatgggcaaactgcctcctcaagtgggtccctgacccctgagtagcctaactgggaggcaccccccagtagaggcagactgacacctcacatggccggatactcctctgagacaaaacttccagaggaatgatcaggcagcagcatttgtggttcaccaatatccactgttgtgcagccaccgctgctgacacccagccaaacagggtctggagtggacctccagtaaactccaacagacctgcatctgagggtcctgactgttagaaggaaaactaacaaacagaaaggacatccacaccaaaaacccatcggtacgtcaccatcatcaaagaccaaaggtagataaaaacacaaagatggggagaaaacagagcagaaaaaatggaaactctaaatatcagagcacctctcctcctccaaaggaacgcagctcctaaccagcaacagaacaaagctggatggagaatgactttgactaaatgggagaggaaggcttcagaagatcaaaccactccgagctaaaggaggaagtttgaacccatggcaaagaagttaagaactttgaaaaaaaattagatgaatggataactggaataatcaatgcagagaagtccttaaaggacctgatgaagctgaaaaccatagcatgagaactacgtgacgaaggcacaagcctcattaaccaatgcaatcaactggaagaaagggtatcagtgatggaagatgaaatgaatgaaatgaagcatgaagagaagttaagagaaaaaagaataaaaagaaatgaacaaagactacaagaaatatgggactatgtgaaaagaccaaatctacatctgattggtgtacctgaaagtgacggggagaatggaaacaagttggaaagcactctgcaggatattattcaggagaacttccccaacctagcaaggcaggccaacattcaaattcaggaaatacagagaacaccataaagacactccttgagaagagcaactccaagacacataactgtcagattcaccaaagttgaaatgaaggaaaaaatgttaagggcagccagagagaaaggtcaggttacccacaaagggaaacccatcagactaacagctgatctcttggcagaaactctacaggccagaagagagtgggggccaatgttcaacattcttaaagaaaagaattttcaacccagaatttcatatccagccaaattaaccttcataagtgaaggagaaataaaatactttacagacaagcaaatgctgagagattttgtcaccaccaggcctgccctaaaagatctcctgaaagaaacactaaacatggaaaggaacaactggtaccagccaatgcaaaaacatgccaaattgtaaagaccatcaagactgggaagaaactgcatcaactaacgagcaaaataactggctaacatcataatgacaggatcgaattcacacataacaatactaaccttaaatgtaaatgggctaaatactccatttaaaaggcacagactggcaaattggataaaaagtcaagacccatcagtgtgctgtattcaggaaacccatctcatgtgcagagacacacatagactcaaaataaagggatgtaggaagatctaccaagcaaatggacagcaaaaaaaggcgggggttgcaatcctagtttccgataaaacagatttaaaaccaacaaagatcaaaagagacaaagaaagccattacataatggtaaagggatcaattcaacaagaagagctaactatcctaaatatatatgcacccaatacaggagcacccagattcataaagcaaagtccttagtgacctataaagagacttagactcccacacaataataatgggagactttaacaccccactgtcaacattagacagatcaatgagacagaaagttaagaaggatatccaggaattcaactcagctctgcaccaagtggacctaatagacatctacggaactccccaccccacatcaatagaatacacattcttttcagcaccacaccacacctattccaaaattgaccatatagttggaagtaaagcactcctcagcaatgtaaaagaacagaaattataacaaactgtctctcagaccacagtgcaatcaaactagaactcaggattaagaaactcactcaaaactgcaaaactacatggaaactgaacaacctgctcctgaatgactactgggtaaataacgaaatgaaggcagaaataaagatgttctttgaaacccatgagaacaaagacataacatactagaatctctgggacacattcaaagcagtgtgtagagggaaatttatagcactaaatgcccacaagagaaagcaggaaagatctaaaattgacaccctaacatcacaattaaaagaactagagaagcaagagcaaacactttcaaaagctagcagaaggcaagaaatatctaagatcagagcagaactgaaggaaatagagacacaaaaaccccttcaaaaaattaatgaatccaggagctggttttttgaaaagatcaacaaaagtgatagaccactagcacgaccaataaagaagaaaagagagaaaaatcaaatagatgaaataaaaaatgataaaggggatatcaccaccaatcccatagaaatacaaaccaccatcagagaataccataaacacctctaagcaaataaactagaaaatctagaagaaatggataaattcctcaacacatacactctctcaagactaaaccaggaagaagttgaatctctgaatagaccaataacaggctctgaaattgaggcaataattaacagcttaccaaccaaaaaattccaggaccagatggattcacagccgaattctatgagaggtacaaggagaagctgataccattacatctaaaattattctaatcagtagaaaaagagggaatcctccctaactcattttgtgaggccagcatcatcctgataccaaagcctagcagagacacaacaaaaaaagagaattttagaccaatatccttgatgaacattgatgcaaaaatcctcaataaaatactggcaaaccgaatccagcaacacatcaaaaagcttatccaccatgatcaagtgggcttcatccctgggatgcaaggctggttcaacatatgaaaatcaataaatgtaatctagcacataaacagaaccaaagacaaaaaccacatgattatctcaatagatgcagaaaaggccttcaacaaaattcaacaacatttcatactaaaaactctcaataaattaggtattgatgggtcctatctcaaaataataagagttatctatgacaaacccacagccaatatcatactgaatgggcaaaaactggaagcattccctttgaaaactggcacaagacagggatgccctctctcaccactcctactcaacatagtgttggaagttctggccagggcaatgaggcaggagaagggaataaagggtattcaattaggaaaagaggaagtcaaattgtccctgtttgcagatgacatgattgtatatctagaaaaccccatcgtctcagcccaaaatctccttaagctgataagcaacttcagcgaagtctcaggatacaaaatcaatgtgcaaaaatcgcaagcatttttatacaccaataacagacaaacagccaaatcatgagtgaactcccattcacaattgcttcaaagagagtaaaatacctaggaatccaacttacaagggatgtgaaggacctcttcaaggagaactacaaaccactgctcaatgaaataaaagaggatacaaacaaatggaagaacgttccatgctcatgggtgggaagaaccaatatcatgaaaatggccatactgcccaaggtaatttatagattgaatgccatccccatcaagctaccaatgactttcttcacagaattggaaaaagctactttaaagttcatatggaaccaaaaaggagcccacatcgccaagtcaatcctaagccaaaagaacaaagctggaggcatcaccctacctgacttcaaactatactacaaggctacagtaatcaaaacagcattgtactggtaccaaaacagagatatacaccaatggaacagaacagagctctcagaaataatgccacatatctacaactatctgatctttgacaaacctgacaaaaacaagcaatggggaaaggattccctatttaataaatggtgctgggaaaactggctagccttatgtagaaagatgaaactggatcccttacttacaccttatacaaaaattaattcaagatggattaaagacttccatgttagaactaaaaccatgaaaaccctagaagaaaacctaggcaataccattcaagacataggcatgtgcagggacttcatgtctaaaacaccaaaagcaatggcaacaaaagccaaaattgacaaatgggatctaattaaactcaagagcttctgcacagcaaaagaaactaccgtcagagtgaacaggcaacctacagaatgggagaaaatttttgcaacctactcatctgacaaagggctaatatccaaaatctacaatgaactcaagcaaatttacaagaaaaaaacaaacaaccccatcaaaaagtgggtgaaggatatgaacaaacacttctcaaaagaagttatttatgcagccaaagaacatgaaaaaatgctcgtcatcactggccatcagagaaatgcaaatcaaaaccacaatgagataccatcacacaccagttagaatggcgatcattaaaaagtcaggaaacaacaggagttggagaggatgtggagaaacaaggaacacttttacactgttggtgggactgtaaactagttcaaccattgtggaagtcagtgtggcgattcctcagggatctagaactagaaataccatttgacccagcaatcccattactgggtatacacccaaaggactataaatcatgctgctataaagacacatgcacacatatgtttattgcagcactattcacaatagcaaagacttggaaccaagccaaatgtccaacaatgatagactggattaagaaaatgtggcacatatacaccatggaatactatgcagccataaaaaatgatgagttcatgtcctttgtagggacatggatgaagttggaaaccatcattctcagcaaactatcgcaaggacaaaaaaacaaacaccacatgttctcactcatagatgggaatttaacaatgagaacacatggacataggaaggggaacgtcacacaccgggacctattgtgtggtgggggtagggggtaaggatagcattaggagatatacctaatgctaaatgatgagttaatgggtgcagtgcaccagcatgtcacatgtgtacatatgtaacaaacatgcacgttgtgcacatgtaccctaaaacttaaagtataacaaaaaaaaaaaaaaagaagcacttaaactaaactcattagggaggaaaaacacaagtagagaagtaaaggtttgtgaataccaaacgcatggcagtccaggaggcagagtggacactgctcttgatgtgagacatgtttacctgaagaaaagccattttttctctttcttctccttctctggagttccttctcagatgagaccctctgaacaaattacacctgcatcttgagaatatgcctttaaggatgtcagtgccacatatttacctgctagcatgacaacaactggcagaaaaagaaaaagtccagccatttctttcctttaaaacagaagagattcaggaacaatgtgctgctccatgaagataatagtatgtttctcctttcctttcctcaggtgccatcacctgccacagacaccagcaatttcttctacagtaatgcagatatatgccacactgacctgtccctaccaaatccaaacagaacaggacttgtaaccaccctttagtgcaaaagtggaacttaattctcatgactgtattttgaagtgttcatacttgattctggcctcaccttagagtcacatgaggcccttaattaaaacaacctgaatgcttccacccagaggaataaacagaagctgtggggagggcacaagatatttctgcaaattggccatgttgtcctagtgacaagcctgggctgataaccactaagctaagcattttctctcaagctttaacgagcttataaatcacttggtaaatttgaccccactttatgtaatgtgattctgcaggtttgaaaaaggtccataaataggtgttttaaacaagtttcctgtcaatgctgatgttgctcccccttcgctcattattagcattagttagagaaagcaggcacagtacagggttccttacactctgaactcttgtaacaaccaaatacttctggtacaaataaggacaacccatctgcatcctaaagacatattatttgctggctctttaaagttgacagagaaaataggaggcagcaatatctcaatacgtttggatttaaaaacaacatgtacacctgtactaatgcaatgtttattaagcaggtactatgagctcaagagtaggatacagagcactgtgctgggcataacacattatgtgatttaattctgataacaacctgggagctggtactaagggtttaataatttccaggatttagataaagggcccagcatttttatttcttcttgtttctctgtcatcaaaccttttaaaaattgtaaagaataaaagctaaatatagacagatgagagaaatatagaaaggaagagtttaatgtagtgtacagaaaattttattctgtttatgtttactttttttgtgacttgtgtagcaatgactgggtctgtaggaatagaaaacaagttactaaatagaatgtctctgcaagcactggttttaatagaaaatttaaaaactaatacccgacaatacataatttatttttcctatttatctgcttttgggtttcagaaatttgtgagcaccaggtctagaaatgcaacaggattccccagccaaaactctgatcccttctaatcagttctgtgaggcaagacttcagggtaggttcagacctaaataaggcctccaaaaagggttaatctgaacaggtctgtgacaggaggaagaccctatgtagaattctgttctctatggcactacagtacttccagttttgttttttctaagcttacctaaaagaaacttaaatcccagagtttctgtaattttagactcttctagccactatcctgtcaactttatactatatactaatatgcaattacataaatcccttaaagttttctagggtaattttttttggtggggggtatggagtcttgttctgtcacccatgctgcagtgcagtggcatgatcttggctcactgcaacctctgcctccctggttcaggcgattcttttgcctcagcctcctgagtagctcggatgccaggcatgcaccaccatgcctggccaatttttgtattattacaaaaccatatatttgccaagctggtcttgaactcctgacctcgtgatccacccatctcagcctcccaaagtgctggattacaggcatgagccactgcgcccagctttctagggtaattttattagaaaataaatatgtacacgtagcaaggtaaaagaaataaaaattatacagctgggcacaaaggctcatgcctgcaattccagcactttgagaggccaaggcagttggatcgtgatgtcaagagttcaagaccagcttcaccaagatggtgaaacacgatgtcgactaaaaatacaaaaatcagccaggttcagtgggagccacctacaaccccagctactcgggagactgaggcaggagaatcacttgaacccaggagacagagattgcagtgagccgagtttctgctattgcactctagcttgggtgatagagtgagactatctctctctctctctctctctctctctctctctatatatatatatatatatacacacacatacatacacacacatatatatttaataacaattctgttcatgaatatccctacaggtgtagccaacagaagtcacagcaatataaagaaagtggcctaaataaagcccaagattttggacacatctctttgttggaccaaccatatgatgcttaatttaattatttacccagttgctagtctagattaaaagtttctggattgtaggaaccatgacttcttcattttttttttaacgactacatgaaatggaagcaactagtttatctatttgggtctccagatcttttccttgtttattatccaagtaccaggaaactggagaaactgtcatctgtgtatcaaccaaagacacctcttgtatgaggggatgaacaaatacaggatgactcacttctcttacactgagacagaagcagaattaaccactcttgtcagcctgaaacaattctactctggccatcctgaaatgcctcaaacacacctaggtgattgtgagagaattcccagtgacccagggctgatggcccaataataagccaggctggagagactcaggctgattctaaataaaaaatggaactgcctggctgagtgcggtggcttctgcctgtaatcccagaactttgggaggccaaggtgggtagatcacttgaggtcagaagcttgagaccagcctgactaacagggagaaactctgtctctactaaaaatacaaaattagccaggcgtggtagcacatgcctgtaatctcagctactcgggaggctgaggcaggagaatcagttgaacccaggaagtggaggttgcagtgagccgagattgggccattgcattccagcctggggaagaagactgaaactctgtctaaaaaaaaaaagaaaaaaggaaaatgaaactgccttggttgagctccagaacctggatcacctgtcctggtttgctagctcttgtgtaagggaaagaacaaaaatactctactccagtaacacattttacaggtaaatatagttgtggccatggctctgcatatgttgtagcctgataatgggaatgggagcagtgtttcagccccagcttctacttataatggtgacatggaaaaaatactgctgagtttccagcatgagtccagatagagatagctccaaaagttctcactgcgacagcccacctcattcaggcaccatgggatactaatagggcttctgaaacagacaaagcactggagagaaaaacagatctccatctgagcaagattattttgaaagaagaaagttaaaaagatcttaagaaaaagcttagattagatataagattgattatgtcagccagaaaatattcccctaaaagaaatttctctctaaacacccaatgtacatagcatgagaaacatatgagcattatgaaaaaatggggcatattttcagaggaattttatagaagtttcttttccatctctgctgctctctcatgtcatagccattgaatgggggttctatactgaaatacatctgacaacttaacactttttgatgaataaatagaatctgactgtgttcatatagtggaatacattagaaattgcaacatagctaactgaatagttattatggtgtttgggtggccacatcacctgtctttatttatcctgtaatagcagcattccaatttagtgaaataaaagatactaaaattgtgtttagtcataattattcctattgaataaagtaataaacacgtcagactaatatctactgtaacaatttggtagtaaattttcttttgatattagatataaataagtatgaataattttaatgaactagtcataatgtatgtagcatttttaaaaattgtaactatagttagtttaaaacactttatatttcaaaagggtaattaacaatattaaaataaccatttaagtgattcaaagtaattattgtggcttcatattcatactattgtagaaaatactgtttatggctcacacctgtaatcccagcactttgggaggctgagggtgggtggatcacccaaggtcaggagatcaagatcaagctggacaacatggtgagaccccatctctactaaaaatacaaaaacttagccaagcgtggtgatgcaagcctgtattcccagctactcaggaggctgaggcaggagaattgcttgaacccagaggcagtggttgcagtcagctgagatcacaaaactgcactccagcctgtgcaagagagtgagactgtctcaaaaagggggaaaatactgtttaatttatatgaatgcaggttgtctacaaacactacacataactatgctaattgttctgaagtaataaatacaaagcaagataaaactacagactccactgttcagtttatgcactgaactgttcttccttttgctgtataggtacttcagcctgcaaatattagataatcaccgtgtggaaaaggtgacatagaggttcctcttcaaagactttcctccctatctaattaggaataaatagtaacttctcttagaagcaaaatttatttgatgggtccattccaagatggccgaataggaacagctccggtctgcagctcccagtgtgatcgatgcagatgatgggtgatttctgcatttccaactgagcaaatggcacaccaagagattatatcccatgcttggctcagcgggtcccatgcccatggagccttgctcactgcttgtccaagaccaaactgcaaggtggcaagcctggctgggggagtagtgtctgccattgctgatgcttaagtacataaacaaagcagcctggaagctcaaactggttggagcccaccacgggacactgaggccaacctgcctatgtagactccacctctgggggcagggaatagctgaacaaaagggagcagaaatttctgcagacttaaacgtctctgtctgacagctctgaagagagcagtggttctcccagcacagtgtttgagatctcagaatggatagaatgcctcctcaagtgggtccctgacccctatgtagcctaacttggagacagctcccagtaggggctgactgacacctcatacagccgggtgcccctctgagatgaagcttccagaggaaggattagacagcaatatttgctgttctgaaatatttgctgttcggcagcctctgctggtgatacccaggcaaacaggatctggagcggacctccagcaaactccaacagacctgcagctgagggacttgactgttagaaggaaaactaacaaacagaaaggaatggcatcaacatcaactaaaaggacatccacaccaaaaccccatctgtgggtcaccatcatcaaagacaaaggtagataaaaccacaaagatggggagaaagcagagtagaacagctgaaaattctaaaaaccagagcatcccttctcctccaaaggatcaaagctcctcactagcaatggaacaaagcaggatggaaaatgactttaacaagctgacggaagtaggcttcagaaagtcagtaataacaaacttctccgagctaaagaaggacgtttgaatccatcacaaggaagctaaaaaccttgaaaaacgattagatgaatggctaattagaacaaacagtgtagagaagaccttaaatgaccccatggagctgaaaaccatggcaaaagaactacatgacacatgcacaagcttcagtagctgaatcgatcaagtggaagaaaggttatctgtgattgaagatcaaatgaatgacatgaaatgagaagagaagtttagagaaaaaagaataaaaagaaatgaacaaagcctccaagaaatatgggactatgtgaaaagaccaaatctacatttgatttgtgtacctgaaagtgagggggagaatggaaccaagctgaacaacactcttcaggatattatccaggaaaacttccccaatctagcaaggcaggccaacattcaaattcaggaaatacagagaacaccacaaagatactgctcaagaagagcaacctgaagacacatcattggcagattcaccgaagttgaaatgaaagaaaaaaagttaagggcagccagagaaaaaggtcgggttacccacaaagggaaacccatcagactaacagctgatctcttggcagaaactctacaagccagaagaaagcggaggccaatattcaacattcttaaagaaaagaattttcaaaccagaatttcatatccagccagactaagattcataagtgaaggagaaataaaatactttacagacaagcaaatgctgagagcttttttcaccaccaggcctgccctaaaagagctcctgaaggaagcactatacatggaaaggaacaactggtaccagccactgcaaaaacatgccaaattgtaaagaccatcaaggctaggaagaaactgcatcaactaatgagcaaaataaccagctaacatcataatgacaggataaaattcacacataacaatactaaacttaaatgtaaatgggctaaatgctccatttaaaaggcacagactggcaaattggataaagagtcaagacccatcagtgtgctgtattcaggataccagtctcatgtgccgagacacatataagctcgaaataaagggatggagggagatctaccaagaaaatagaaagcaaaaaacagcagggctagcaatcctagtctctgatgaaacatactttaaaccagcaaagatcaaaagagacaaagaaggtcattacataatggtaaaaggatcaattcaacaagaagagctaactatcccaaatatatatgaacccagtacaggagcaccctgattcataaagcaaatcctgagagacctacaaagagacagactcccacaaaataataatgggagattttaacactccactgtcaatattagacagatcaatgagacagaaggttaataaggatatccaggacttcaactcagctctgcaccaagtggacctaatagacatctacagaactctccaccccaaatcaaaagaatatacattcttcttctcagtaccacatcacacttattccaaaattgatcacataattggtagtaaaacactcctcagcaaatgtaaaaaaaagaaatcacaacaaactgtctctcagaccacagtgcaatcaaattagaactcaggattaagaaactcactcaaaaccgcgcaactacatgaaaactgaacaacctgctcctgaatgactactgggtaaataacgaaatgaaggcagaaataaagatgttctttgaaaccaatgagcacaaagacacaatgtatcagaatctctgggacacattcaaagaagtgtgtagagggaaatgtatagcactaaatgcccacaagtgaaagcaggaaagatctaaaattgaaaccctaacatcacaattaaaggaactagagaagccagagtaaacaaattcaaaagctagcagaagacaagaaataactaggatcagagcagaactgaaggagatagagacacaaaaaaaaacccttcaaaaaaatcaatgaatccaggagctggttttttgaaaagatcaacaaaagtgatagacactagcaagactaataaagaagaaaagagagaagaatcaaatagatgcaataaaaaatgataaaggggatatcaccatccatctcacagaaatacaaactacgatcagagaatactataaacacctctatgcaaataaactagaaatggataaattcctcaacacatacactctcccaaaactaaaccaggaagaagttgaatctctgaatagaccaataacaggctctgaaattgaggcaataattaatagcctaccaaccaaaaaaagcccaggaccaggcagattcagagctgaattctaccagaggtacatacaggagttggtaccattccttctgaaactattccaatcaatagaaaaagagggaatcctccctaactcgttttatgacaagagcatcatcctgataccaaagcctggcagagacacaacaaaaaagaattttagaccaatatccctgatgaacatcaatgcaaaaatcctcaataaaatactggcaaaccgaatccagcagtacatcaaaaagcttatccaccatgatcaagttggcttcatccctgggatgcaaggctggttcaacatatccaaatcagtaaacataacccatcacataaatagaaccaaagacaaaaaccccatgattatctcaatagatgcagaaaaggcctttggcaaaattcaacagcacttcatgctaaaaactctcaataaactagatattgatggaatgtatctcaaaataataagagctatttatgacaagcccacagccagtatcatactgagtgggcaaaacctggaaacattccctttgaaaactggcacaagacaggtatgccctctctcacctctcctattcaacatagtgttggaagttctggccagggcaatcaggcaagagaaagaaataaaaggtattcaatcagaaaaagaggaagtcaaaattgtccctgtttggctgggcatggtggctcacacctgtaatcccaacactttgggacaccgaggtgggtggatcacaaggtcaggagatcgagaccattctggctaacatggtgaaaccctatctctactaaaaatacaaaaaaattagccaggcatggtggcaggtgcctgtagtctcagctactcaggaggctgaggcaggagaatggtgtgaacctgggaggcaggtttgcagtgagccaagattgtgccactgcactccagccgggcaatagagactgcgtctcaaaaaaaaaaaaaaaaattgtccctgtttgcagacaacatgattgtatatttagaaaacccattgcctcagcccaaaatgtccttaagctgataagcaacttcagcaaagtctcaggatacaaaatcaatgtgcaaaaatcacaagcattcttatacactaataacagaaaaacatgggtgaactcccattcacagctgctacaaagaggataaaatacctgggaatccaacttataagggatatgaaggacctcttcaaggagaactacaaaccactgctcaaagaaataaaagaggacactaacaaatggaaacacattccatgctcatggataggaagtatcgatatatggtcatcagagaaatgcaagtcaaaaccacaatgagataccatctcacacaatttagaatggtgatcattaaaaagtcaggaaacaacaggtgctggagaggatgtggagaaataggaacgctattacactattggtgggagtgtaaactagttcaaccattgtggaagacagtgtggcaattcctcaaggatccagaactagaaataccatttgacccagcaaccccattactgggtatatacccaagggattatgaatcatgctactataaagacacatgcacatgtatgtttattgtggcactatttgcaatagcaaagacttggaaccaagccaaatgtccatcaatgatagactgaattaagaaaatgtggcacatatacaccatggaatactatgcagccataaataatgatgagttcatgtcctttgtagggacatggatgaagctggaaaccatcattctgagcaaactatcgcaaggacagaacaccaaacattgcatgttctcactcataagtgggaattgaacaatgagaacacttggacactgggggggaaacatcacacaccggggcctgttgtagggtggggggatggaggagggatagcattaggagaaatacctaatgtaaatgacaagttaatgggtgcagcaaaccaacacggcacatgtatacatatgtaacaaacctgcacattgtgcacatgtaccctagaactaaagtataatactaaaaaaagcaaaatttattcaaaaacctgtgctaacgttctcaaatatctgatagctgtaataaagaaatcaatacactttatgttcttaactcccacaatttagctaaatatttcctggacatgcttatactggtccaagcaagcattaggccatagcctgttccttatttgaaggtgtttttacctttctcagcattccacaagttacttcctccttcctttgttctcatctgcctttgcctcttttaaaaagttctaagttgctagccaattgggacaaatacagaatgtgagatcctgttccagcctttggaaactggacacagcagtagggtggatgcttcaggttataaacaaccctgtctcctttgttcagtgtactctcatgacaaaactattaatgagtgtaccctttctgcagaaagtaaaaatggccttgctgataaaattaaacttatgttctagtgctatttcgttatggcaccggggaacaagcatttctaacaattttgttggcccatatggggataccttctcctccaggtgtggtctcccatcctctctcatgaggaagcgtgctcctctgcctcattgcagtggcctcagggataaggaatcaagacccatccagtgtgacaaataaacctggactctcaccaatgcagaaaaaaaacaaaaaacctgaccagtgaccaggagtaaaggattctcacatatcacatgaaccagaaaactctgtgcacagaccgaggtaaaaaaacaccgggagagctgctaaagtatttcctttgtggttgggactaaggaaaaagctgcagggcggtaacacattccttgattaggatataccaaggagagaaatgcaggggtggtaaatcattccttagatgggtctagggaaagaaaaccagggggggctgtgaaatattccttagctgggatatcttggagattaaaaagaggggagaaatccccatttggggggtttgaatctcaaaaagaggtaagaaatccccactgcgggagtggaacctcaaaaagaggtaagaaatccccaatgtggggattgaacctcaaaaagaggtgagaaatccccatggtggggtgaacctcacacaaacctctggtagtaaaaaaaagaattcaaaacttccctttcccctcttcttggggaaagaaaaatgctaagctccattgccaccagtcgctcccctaggggaaagggaaggagaggggggaaatcagcaggtggctgttagaggcaaaagaaagaccacagagaggaaaaagaaactaggagaagacgtcaaagtaaaagagagcaaaaacagtaagcgcagtgccagacagccaggcatgccaagggttaagtccctttccccagcccagctctatgtgaaaaagagggtggggaccagtagcaggagtagagcagagtaggtgaaagaacacaattcttgcaacttgcggcaggcaccttccaagcctgtgggccagtgatggcccagcacccagactgcagccatacaaatcccacccagcctgagaaactaagtgtaggaaaaaagaaagaaaataaaaagggaaatcggaaaaaaaaataaaaaccaggagaaacagatggcagcactttcacagaggtggggcctatgccattgcccagccccgccagagaactcgggagggaaaaaggaaacaggacatgacagagagagagacaaaaaggagcacaaatgagagagagagaaatagagggaaataataagtaagagagagactggaagagagaaatcaaaggaagactcagagggtgaaactaggaaaagaaatagtgtaaaaggaaggcagaaagttaaaacatgttgaagattgtgaaagtcataagaaaaattataaaagggaatttatgagagaaatattatataatttaaaagtaattaggcctcctgaatgtaaaactattcaaaaaaacagtttatgtacaaggtatataagaaaaataaaatatacttttcaccatagaatagtgtgcagccataaaaaaggatgaattcatgtcctttgcaaggacatggaggaagccggaaaccatcattctcagcaaactatcacaaggacagaaaaccaaacactgcatgttctcactcataggtgggaactgaacaatgagaacacttggacacggtcaggggggaacatcacacactggggcctgtcagggggtgggggtctgggggagggatagcattaggagaaatacctaatgtaaatgataagctgatgggtgcagcaaaccaacacggcacatgtatacctatgtaactaacctgcacattgtgcacatttaccctagaagttaaagcataataaaaaacaagtaaataaaagtgagttagaaaaaaataaagaaaaataaatatacttttaataaaaggattataaggaggcatacgaatatggatttttatctacattaaaaggttaaaaaacattttgttttagaggtttaagcaagttttaaaatattaattgtaaaggaaactctgtgtgaaaacatattggctaaagttaaaggggtatcatccagttttcctgtgaactggacattaaaataaaagcacaatagatttttcttaaagcactaacctgctctttaacaaaaattataaaaggttaaaaagagtctataaaaattttaccttatagtcagacattaaaagtgaataaataatgtctacaagattttatttaaattaagtttaacattaatagcacattaatataaaggtaaaatttaacttatctggtataaaatcatacaaaaatcattgtcaaatataaaatgatgtttagctttcctaaggcccgagggcggccggttaagtcacaagggccctcatccccaaggccacaacacgcggggacagtgaaggtcacaagaaggccaagaccttaagagggggcagggccacagcatcccctggacagcgctaagcaggaatggagcgggaggcatcaccatgggtcctcaagccccaggatatgcagcagaaattatatacttaatttatcttccactttcccttccctcaaaactaaaagtcttttaacacaggtaccacccctagaatttccagtacaccagcaccagcctgaaaaccaagtcctcatcagaagccagaaaggaaagaaaaaactcaagccagcctgggaaggaccctatcttatgctgttaactactgagactgccatctgcacagccgagaaacaatggacccaccatacccgagtcaagaaaacatattcctcatcagaatcatgggttaccgtactaggatcaagccctgctaagttaaagtttaaaaaaagcttaattttcatataccttctatattgcttcccttcctttccttattcccttactagctccttttttattaatgttactaagtctgactcacctcagaccattgcctttaatgcttgctctgtcatacattatggaaatgtaaaaaatcaatgacagctagccttttcacacaaatatttatgtcccagtcctctaattgacatagttacccctggcactcatcgttgtaatcacctgtagccaagacgtcaattttctgctcctacagcctggaaaccttgtagtaaatgggactacttcctttaaactactcaggagcaaagttggacttccatgaaaaaggtttgtgcatatctaaaacccctcatctatttcacaaaaagaactaccccttctaactgtcagccttatcaatgaaaccctgtccttctctctatcactacctccaccttaactaactctagacctgcccttagtcgcttctatggtatggggattgacataaatggaaaagaccccctaggtatttttaaaatatgcatcattcccccatcttccccttcttcagtagcctcagttctagatcccacaccggttgctcctacatctaataataaaactagggtgtctattgtaaaaataagagatctaagatagaccttagccatcaagataaaatatcaagatgcaaatgcctggttggaatggattaaatattctgttcagactttttaaaaaagtgattattatgcttgttcacaccataggccagaggcccagattatcccctttccactcagatggtcttcttgtcaaccaaatatggactgtatggggcctctctttcagaaacccattgcttcggataatccatcatgctgagctctctctctgctatttcctgagagtcagcccctgagggcaatccagcttccacctctagatgccaagtttacttcgtgcctctcacagcaaggggaaaatgtggtgttccttggaagcataaaaggatgcaaagacctcaatcctttccaagagcttgaccatcagtccatgcgtagccatccccaagcaaatgtatggttgtactgtggaggacctttactggacgctgccaaataattggagcagtacttgtcctctaatccagttggctaacccattcaccctggcatttcatcaatctaaaaaaagtaaaaacaaaacagtgcaggccaagggaaactccttataaatcctttaatcctcaggtttacgtaaatgctattaaggtcctgtgagaagtgccaaataagtttaaagcacaaaatcaaatagctacaaaatttaaatccacgttgttctggtaggtaactataaataaaaaaagttaactaaatacactatatctattacaatcagcaacaattcacaaattgcactagggacgccatcaaggggatagctaagcaattaggacgtaccagccggatggcctagaataataaaatagctttaaatataacactagcaaacaatctaagctgatcccggttgacttagacccaaactttttccaaatagggtaaatgcgcgatttgcgagaaagggagaagagggaagaagaagcggtgtggttgatttacaacttttacaacttatcaccaggaagttgagtctttgaaaaggatctttgttgtcctaacaaccccttaccccaagtgatccacccacctgggcctcccaaaatgctgggattaaaggagtgagccactgtgcctggccccacaaatttttaataggagaaaagagaagctgtgaaccccatggatcaaagctcttcccattcatgaacctgcaccctgacgcaagattctcccctgatgaccctcccatggtccctgcacaatctgggagagacgccgtgctgtgggtgcagagctgcccagagagggctccaggccagtgcacagtcactgaacagggaagagactggatgcccaggggcctgcctgtcagcggagccgccatcttacggctgaacgggactgaggctgagctggacaaggacacctcagggcgcagattgtggagctgacttcggggaggcctgaatcccaccacagccacttcccactgattccaaccagtccctcccctctcttgggatgtccaattggcaccctcaccatttctaggcttccagaaggtcccagcatcttagctgtggatctcccaataccggcaggacacagagccacagaggctgggcctctaggagcagaggacacagaggactgaagacgagacctggagctcctgctgcagcaagagacaaagtccgcgccaaacccagaagttgtcctgttctctccagctgggtgtctgattggacggtttccagctcagagttcctgattggataatgcttaaggtcccgccccctcaggccttgagtgacagaagatgtgatcaggtgctgggctgagtgaagaaagagcaacagcctaagctgcagccttttcaggcagggcttcctccctgagctgagccaggcccaccccagaacatgagaaaattctgtctctttttcactctcggtctttttgaatatattcaaaaggtgaacagaagtactttgctgtcatattaataatacataaaatttttgttcaagagaaaatcaacttttactttggtaatagcgtattatcaatactaaagctaattttaataaaaccttaaaaataaatcaaatttgtcatttttgacctcgagatttacatatatattttgcattctcttgtaatttttttatctttttatattttctttttctctacattctttttattttttttctatttgaaacaaccattaagtaatttcaaaccgttataggagatagaaagaaatcatttagggccagatgcagtggtgcacacctgtaatcccagcactttgggaggccaaggtgggcagatcacttgaggtcagaagttcgagaccagtctagccaacgtggttaaacccaatctctactaaaaatgcaaaaaattagccaggcacggtggtgcacacctgtagtcccagatgctccggaggctgaggcaggagaatcgcttgaacccaggaggcagaggttgtgtgacagcccaaggggttccccttgccctttgcccagagagagctgattcatcaagacagaggaatttgtggaggaaaaattaaatattaaatttgaactcaattaaacatggacacaaaaaatagacaccaagtcctgaaacaggttatgtgagcccccttgaggtgttcatcctgcactgttttggagaaatctctatttcagtctattcctacacattagttattgaaaaacaatagacgatcacaagaaaacaagttgacctttttgtgttccttgagctcagtcgcaaagggccctcatgactgggcctcataccaaacaactcattacaaaaagagctagggccccagaccacaccgaagcttcaggagacctctccttatctgtgcaaggatggatgaccaactcttgagcccaaggtgttgcttcccagtctggtggtgaatcctccatagtctgatgagtgtggtgttcaactctggagtccagcctgttgcttcttggtctggtggtgaatcctccatagtctggtgtggaggcaaagttaaatagcaaatttaaactatatgaatgtggacacaaacagtggtcaccaagtcctggaacaagttgtgtgagcctattgaggtgttcattcagtgctgttttggagaaatctctatttcaatgtattcctctacattcgttattgaaatcaatagacaatcgcaaaaataagttgacctccttgagcccagttgcgaagggccctcatgactgtcacacgtgtccgtgtgaagagaccaccaacaggctttgtgtgagcaataaggctgtttattcacttgggtgcaagtgggctgagtctgaagagagtcagcgaatggagatggggaaggggttgcttcataggagttgggtaggtaatggaaaattacagtaaaaggtggttattatctattgttagcagaggagggggtcacaaggtacatggtgggtagatcataagactcactgtccagaagaagaatgtcacaaggtcgattgatcagttaaggtagggcagggacaagtcacaatggtgtaacggtgtaacgttggttaatcagttgaggcaggaactagctcttttacttgttttgtgttttttcagctgccccagatttcttggctcctgcaggccacctggatgtgtatgtgcaggtcacaggggttacaatggctgagctttggctcaaaggcctgacattcctgtctttttatttataaaatataaagttacaagataagataaagaaaatgtaagtttttactgaggataattggggtaggggtgaagtttctcagggctgcttcaggcatgacttaggggtggtgtgaacacctaaagaaaatgtaattttatagtgagttggtctagaaagtttttgggtacaattctgtgtggcaaacaaggcatcagctagcatatttttgagcttggaattgtcctaatatagtaaattctctaaaaaatcgtaattaagcataatagctttaaggtaggtggcagtgagtttttaggccaaggtaagaataatgttttatatagtaaagctttttgtctccattttccatcctacaaataggatccctagagtgaagccaaaagtctattatattacctttttcctaaaggtgtgagtggagttttgaatggaagagttcaatagtcctgattgcagaccttatacaggaaagataataagtacaatagtccctgtatcctggaataagttggggctggcaaagagagaaatgtcctaggccttctaacaaccaacgacagaccatatgttgtcctggatgttcacctgaatgccagatatgtggaactagtcctgtatatgcatattgctggtaatttttatatgagtaggcctgaggacaccatgggtgaggatttgacacctgtcaatccaggcattttagatttttaatccagagatctttgattttgggggtggggaaaatcttggaggacaaggcctgaagaaagttgtttttagagacaacaggtcctaagagattagcgtttagaggactgggtgaagcaggcctggaagtatgtttggacagccatttggaaggggtgttgcatggaagcttggtcttgtctggatgctgccaggagttcatcattgacttagtcttaaaggtgagaaggtgagaaggagtataaagatgagaaggagtgagaaggagtataataggtgagaaggtgagaaggagtataacaggatgaggaatagaagtttaggctgtggggcgattttagggtacatgatagtactgtggggttgttagaagcagcaactgccatatggaatgattggtgatggcctggatgcagttttgtatgaattgagagactaaacgaaagacctttcactgtcacacactcattttcacagtaagaacctgttcgctgtcatccaatcattcacaacagtgggaacaagttcactgtcacccacttgtttacagcagtaaaaacctgttcactgtcagccatgcagtcaccacattggtaacctgttactgttaaacactcattcaacatattgggaaccatttcactatcacaaacacattcaacaccctgagaacctgttcactgtcacttactcattcaccacagtgagtacctgttcactgttacccactcattcaccacagtgggaacctcttcactgtcagccactcactcatcatagaggaaacctgttcactgtcatccactctttcaccacagtggatacctgttcactgtcacccacaaattcacaacagtgggaatctgttcactgtcagacactcattcatcacaatgggaacctattcactctcacccactcattcatctcagtggaaacctgttcactgtcagccactcactcatcacagtgggaaactcttcactgtcacccactcattcaccacagtgggaacgtgttcactgtcattcactcattcatcacagtggtaatgtgttcactgtcacccatcccatcattacagcaggaacctgatcactgtcatctactcattcatcacagtgggaaccaattcactgtcagccactaattcaccacattggtaacctgtttcctgtcagccactcattcaccacagtgggaaccagttcactgtcatcccctcatttacagcagtagaaacctgttcactatcagccactcagtcagaacagtgtgaaccagtttactgtcagccacaccctcatcagactgggaacttgttcaccctaacccactcatttatcacagtgggaacctgttcactatcacccactcattcaccacagttggaacctcttctctgtcacccactcacacatcacagtgggaagctgttcattgtcgaccaccccttcattgcaagaggaacatttaactgtcacccactcattcttcacagtgagaaccagtttactgtcacctgatcattcaccatagtgagaaccagttaactgtcacccactcatttgctgcagtaaaaaccggttcactatcagccactcagtcaccacattgggaaactctttactgtaaattactcattcactgcagtgggacccagttcactttcacccacacattcatcacagtgagaacctcttcacagtcacccactcactcaacatagggggtacctgttcactgtcttccactcattcatcacagtgggaacctgttcactgtcccccacatattcattacattctgggaacctgttcactatcacccactcattcatcacagtgtgaacatgttcactgttgcccacttactcaccacactgggaacttgttcactgtcacccactcaatcatcaaagttggaacctgttcactttcactgacaaattcaccacagtgggaaccagttcactcccacacacttattcaccacagtgggaacctgactactgtcacccactcatttatcaaattgggaacctgctaactgtcacccactcattcattacaggaggaacctgtacactgtcacccacttattcattacaggaggaacctgtacactgtcacccactcagtctacacagtgggaatctgttcattatcaaccactcattcacaactgtggaaacctgttcacggtcacccactcgttcacctcagtagaaacctgttcactgtcaccactcactcactcactacaatgaaaacctgttgtcagccactcattcatcagagtgggtacctgtcactgtaacccactcattcattactggaggaacctgatcactgtcactcactcattcaccacagtgaaaatctcttcactgtcagccactcattcatcacagtgggatcctgttcactgtcacccactctgtcctcacagtgggaatatgtacactgtcaccaactcactcatcactgtgggaacctgttcactctcacccactcatttacctcagtgggaacctgttcattgtcacccactcaatcatcacagtgggaactttttcactgtcatccactcactcttcacagagggaacctgttcacagtcagccactcactaaaaacactgggaacctgttcactgtcaccaactcactcatcacagtgtgaaccttttccctgtcactcactcattcatcacattcaaaacctgttcactgtcacccactcattcatcacagtgagaacctgttcactgtcacccacacagtcctcacagtgggaacctattcattgtcacccactcattcattacaatgggaacccgttgtaattcactctcacccactcatttaccccagtgggagcctgttcagggtcacccactcactcatcacagtgtgaacctgttcactttcacccactcctttctcacagtgggaacctgctcactgtcacccactaattcatcatagtgggaacccgttcactgtcacctactcactcatcatagtgggaaaaaggacacttttacacaaacattcactacagtaggaacctgttcactatcaacaactcactcatcactgtgggaacctgttcactctgacccactcatccatcacagaggtagcctatttgctgtcacccactcattcatcacagtgagaaccagttcactctcactctctcattcaccaaagtgagaacatcatcactgtcacccactcactcatctcagtgggaacctgttcactgtcagccactcattcctcacagtaggtacctgttcactgtcacccaataattcattacaggaggaaactgatcactgtcacttatgcgttcaccactatagaaacctgttcactgtcacacactcattcaccccagtgggaacatggtcactgtcagccactcattcaccattctgggaacccgttcactgtcacccactcactcacccagggggaacctgttcactgtcgcacacttcctcatcacagtgggaaactgttaactgtcagccactcattcatcatagtgggaacctgttcaatgtcagccactcattcaccacagtgggaacctgttcactctcacaaactcactcaccagagcagtaacctgtttactgtcagccactcattcaccacaacaggaacctgttcactctcacccaattactcatcacagtaggaacctattcactgtcacccactcattcatcacagatggaacctgttcactctcaaccactccttcaccaccttgggaacctgttcaatgtcacccactcatcatcagagtgtgaacttgttaactgtcagccacacattccccatagtgggaaccagttcactttcattcagtcgttcacggcagtagaaacctgttcactgtcacccacttatttatcactgtgggatcctgttcactgtcagacactgattaatcacagtaggtaactgttcactgtcattcactcattcattacaggaggaacgtgatcaccatccaccactggttcacgacagtagaaacctgttaactctcacccactcattcaccacagtggaaacctgttcactgtcagccactcatttaccatagtggaaacctgttccctgtcaccctgtcactcaccacattaggaagcggttcactgtcacccactcagtcatcacagtgggaacctgtttactgtcacccactcaatcatcacagtggaaacctgttcactctcacccaaccattaaccacagtgggaacctgctcactgtcacgcactaatttatcactgttcactatcacacacacattcaccggagtagaaacttgtcccgtcacccactcactcatcacaatgtgaacatgttcactgttagccacccattcatcacaatgggtacatgttcactgtcacccactctttcattacaggagaaacctgatcactctcatgcactcatttaccacagtagaaacctgttcactgtcactcaatcactcaccacagtggaaatctgttcactgtcagccactcattcatcactgtgggaacctgtttactatcagctactctaccaccacagtgggaaactgttcactgtcacccactcactagtcacagtgaaaacccgttaactgtcattcactcactcatcacagtaggaaactgttcactgtcagccactcattaaccacagtgggaacttgttcactgtcacgtaataaatcatcacagtgcgaaactcttcactctcacaaactcattcaccacagtggaaacctgttcactgtcacacactcgttcatcacagtgggaacctgtttactgtcacccactcattcattacaggaggagcctcttcactgtcagcccctcattcatcacattgggaagctattcactgtcagccactcactcaccatagtgggaacctttttaatgtcaccaacatgttctccgcagtagaaacctgttcactgttactcatttactcatcacagtgggaacatgttcactgtcatacccttattcatcgcagaggaaagctgttcactatcaggcactcattcaccagagtagaaacctattgactcactcacacactcatcacagtgagaacttgttcattgtcagccactcatacatgacagtggacagctgttcactgtcacacactcattcactacaggaggtaccccattactgtcacccactcattcaccacagtagaaaccggttcactggcacccattcattcaccacagtgggaaactgttcactctcaaccactcatttattacagtgggaaactcttcactgtcaaccactcattcagcacagtgggaaactgttcactgtcacccacttattcaccacagtaagaccctgttcactgtcacacacgcattcatcatagtacaagcctgttccctgtcacccactcattcatctaagttgggacctctttactccaaccctcacattcaccacagtgggaacctgttcactgtcacacactcattaatcacagtggaaacctgttcattgtcacgcactcatttattacaggagaaattggttcattgtcacccacttattcatcacagtgggaacttgttcatgttagccactgattcacaacagtgggaaactgttcactgtcacccactcgttcactgcagtagaaaactttccactgtcacccactcattcatcacagtgggaaactcttcactgtcagccacttattcaccacagtggaaacctgttcactgtcacccatgcattcactgcagtataaaactgtccactgtcacccactcactcatcacagtgtgaaaatgttcactgtcagccagtcattcatcacagtgggtacctgttcactgtcacccactcattcattacaggataaatctgataactctcacccactcattcaccccagtagaaatctgttcactgtcatccactcatttaacacagtgggaacctgttcactgtcagtcattcattcatcgcagtgggatcctgttaactgtgagccactcattcaccacagtgggaaccagttcagtgtcagccactcattcaacacagtgggaccctgttcactgtcacccacgcattcatcacagtggaagcctgttcactgtcacccactcattcattacaggaggaacctattcactgtcacccgctctgtctttaaagtggaaacctcttcactataatccacacattcaccacagtggtaacctgctcactgttacccacttattctttacaggaggaacctgttcaccttcagccactcgttttcacagtgggaacatgttcactgtcagccagtcattcaccaagttgggaaccagtttactgacacccactcatttgccacagtagaaacctgttcactgtcagcctctcagtcaccacattaagaacctgcttacagtcagcaactcactcatcacagtgggaacctgttcactgtcacccactcatttctcacactgggagcgtgttcattgtcagtcacacatttaccacagtggttacctcttctctctcagccacttattcaccacagtgaaaacctgttcactatcacccactcactcttcacaatgggaacctgttcactgtcacccactcactcatcacagagggaacgtcttcactgttacccacttattcaccacagtgggaacctgttcactctcagccgctccctcattacattgggaatctgttggatgtaaccaacttattcattacaggaggaatctattaactgtcacccactcattcatcacagaggaaacctgcttactgtcacccattcattcatcacactggcaacctattcattgtcaccactcactcatcacagtgggaacctgttcaatgtcatccactcattcatcacagtggaaacgtcttcacagtcacccaataattcattacaggaggaatttgttcactgtcactcgctcattcttcacagtttgaaacttttcactgtctctcctttttcatcacactaggaaactgttcactgtcagttactaattcaccacagtgggaaactgttccctgtcaggcactcactcaccacagtgctatcctgttcagtgtcacccactcactcatcacagtgggaacctgttcactggcacccaatcattcatcacagtgtgaacctgtacactctcatccactcattcctgacagttggaacctgttgactgttacacactcatcacagttggaacctgttcgctctcacccactcaccacagtggaaacctgttcactctcacccactaacttatcacagtaggaagctgttcacttgaacccaatcattcatcacagtggggaccttttcactcccagtcatttatgacagtgggaacctgttcactgtcaccaatgcattcattacagtgggaacttattcctgtcacccactcattccttacaggagaaacttcttcactgttacccactcattcattacagtgggaacctgttcactgtcagccactctttcaccacagtgggaaactgttcactgtcacccactcattcaccacagtagaaatctgctcactgtcacttactcactcatcaagtgagaacctgttcactgtcacccacccattcaccacagtagaaacctgctcactgtcacttactcatcaggcgagaacctgttcactgtcccccactcattcatcacagtgggtacctgttcattgtcacccattcattcattatgggaggaacctgatcctgtcaaccactcattaatcacagtagaagccagttcactgtcaccaactcactcaccacagtgggaacctgttcactgtcagccactcattcatcacagtgggaaacagttctctttcagccactcaatcaccacagtgagaacaatttcactgtcaccccctcattcacagcattaaaaacttgttcactatcagccagtctgtcaccagagtgggaacttgtctactgtcagcgactcactcatcacagtgggaacccactcactgtcactcacttattaatcacagtgggaacctgttcaatgtcacccacttattcatcacaggggaacctgttcactttcacttaatcattacagaaggaacctgttcactgacaccaacacattcatcacagtggaacctgttcactgtcacccactcactccccaacgtggttacctcttcacagtcacccactcaatcattacattgggattctgtttactgtcacccattcattcattgaaaaaagaacctgttcactgtcagccgctcattcatcacagtgggaacccgttcactgtcaggcactcattcaccaaagttaaccgtttccctgtcacccactcgttctccgaaacagaaatttgttccctgtcacccactcactcatcccagggagaacctgttcacagacagccactcattcctcctagtgggtacctcttcactgtcacccactcattcattacaggaggaacctgataactgtcactgacctgttcactagagtaggaaccttttcacagtcagtcactcattcatcatagtgggaacctgttttccatcagccactcactcaccacagcaggaaccatttcactgtcacctactcattcatcgctgtagaaaccttttcactgtcagccacgcagtcatcagagtggaatctgtttactgtcagtcacttagtcatcacagtgggaacctgttcattgtcattcactcattcatcactgtgggaacctgttgaatgtcacccattcattctccacagtgggaaccacaacactgccatccactcattaatcacattgagaacctgttcactgtcaccaagtcattcattacaggaggaacctgttcactgtcacccgctaattcttcacagtgaaaaccaattccatatcacacactcactcaccgcagtgggagtctcttcagtgtcacccattcacttatcaaagtgggaacctcttcactcttacccactcatttaccacggtgagaacctgttcattgtcacccactcattcatcacagtgggatcctgttcactgtcacccacccattcattacgggaagagcctgttcactgtcacttattcattcatcagagtgggaaactgttcactgtcagcaactcattcattacagtgggaacatgttcactctcacccactcattcactacagcagaaacctgttcagttaccttctcactcatcccagtggaaatgtcttcattgtcagccactcattcatcacagtggatacctgttcacagtcaccttctccttcattacaagagaaacctgatcactgtcacccactcgttcatcacagtagaaatatattcactgtcaccatctaattcaccacagtgggaacctgttccctgacagccactcattccacagtgggaaactgttcactctcacccactcattcactacagtgggaatctgttcactgtcacccactcattcactacagtgagatcctgttcactcacatgcactcactcatcacagtgggagcctgttcactatcagccacagtgggaacttgattactctcaccaactctttcaccacagtgggaaactgttcactctcatccactcatttaccacatcaggaacctgttgattgtcacccactcattcatcacagtaggaaactgttcactgtcacacactcatttatcacagggggaacatggtcactctcactcattcattcaccacagtggagacctgttcactgtcacccactcattcactacagtgagatcctgttcactcacacgcactcactcatcacagtggcaaccgattcactctaaaccactcattcaccacagtgcgaattcgttcagtgtcagccaatcacgcatcacagtggtaccctgttcactgtcgggttgtcattcaccagagcgggaatctgttcactctcacccactcattcaccatatcgggaacctgttgattttcacccactcattcatcacagtaggaacctgttcactgtcacacactcatttatcacagtgggaaactgttcactctcattcactcaccagagtgggaacctgttcactctcacaaactattccaccaaagtgggaacctgttcactctcacccactcattcaccacatcgggaacctcttgtcatccactcattcatcacagtaggaacctgtttactgtcacacactcatttatcactgtgggaacctgttcactctcactctctcactcatcacagtggaaacctgttaactctcagccactcattcaccacattggaaacctattcactgtcacccactcattcatcacagtgggaacctgttaactgtcacccacccttcattacagaaggaacctgttcactgtcacccactcatttatctccagtgggaacctgctcactgtcagccactcattcatcacaatgggaacctgctcactgtcacccactcattcatcacagtggaaacttgttcactctcactcacacattcatcagattgggaacctattcactggcacccactcactcatcatagtaggaacctgctcagtgtcacccactcactcacaagtgtgaaaacctgttcactgtcagtccatcattcatcacattgggaacctgtaaactgtcagctactcattcatcacagtgggaaccttttcactgtcacccactcattcatcacactggcaagctattcattgtcatccactcactcatcacagtggaaagctgttcactgtcatccaatcactcatcatagtgggaacctgttcactctcagccactcattcaccacagtgggaacctattcactctgacccactcagtcaccatgtggtaatctgttgactgtcacccactcattcatcacagtgggaaccttttcactgtcattcactgattcatcacagtgggaacctgttcactctcacatactcactagtcacgttttgaacatgtgcactgtaagccactcgttcatcacattgagaacctgttcactctcacccacttattcaacacagtgggaacctgttcattgtcacccacacattcattacaggaagaacttgttaacagtaacacactctttcatcacagtgggaaactgttcactgtcagccattcattcaccacagtggtaacctgcttactgtcagccactcactcaccgcagtgaaaacctgttcactgtcacccacctgatgacctgagtagaaacttgtttacttgcagtcactcattcaccacagtgggaaatttcattgtcacccactcattctcaaaagtgggaaccagttcgctgtcacctacttgttcaccgcagtcgaaacctgttcatggtcagccccatggtgatgacagtgggaacctgtttactttcagccactcattcaacaaagcaggaaccagttctttgtcacccactcattcatcacagtgagaacgtgttcactgtcatccgctcattcatcacagtgggaactagttcactgtcaaccactcactcatctcagtgggaacctgttcactgtcattcactcattcatcacagtgagaacatcctgtatttcagccactcattctccactgtgggaacaagttcactgtcacccactcattcaccttagtaggaacctgttcactatcagccactcagtcaccacagtgggaaccattttactgtcagccagtcactcatcatagtgggaacctgctcactgtcactttctcattcttccctgcgggaacctgtttactgtcacccactgattcaccacagtgggaacctgttcactgtcactcactcattcattacagtggaaaactgttccctgtcacccacgcactcattacatgaggaacttgttcactgtcacccactcattcatcacagttggaatctgttcactctcacctatgcattcaccacagtgggaaaattttaactgttacccactcattcatcaaagtgaaaacctgttcactctcacccactcatttacgacaatgggaaccagctcactgtcacccacctgttcatcacaatgggaacctgttcactgtcaaacactcatttattgcaggaagaacctgttcactgtcacacactctttcattacactgggaacctgttcactgtcacgcactcattcattagagttggaacctggtgactgtaacacacacattaattgcagtgggaacttattcactgtcagtcactaatttgccacagtgggaaccagttcactgtcacccactagttaaccacagtagaaacctgttaacagtcagcaactcactcatcacagtgggaagctgttccgtgttagccactcattcatgacagtgaatacctgttcactgtcacccacttatttatcacaggagtaacttaattactgttacccacgcattcaccacagtagaaacctgtacactgtcacccactcattcgccccagtgtgaaccggttcaatatcagccactcattcatcacagtgagaacctgttccctgtcagcttctcattcatcacagttggaacctgttcactgtcacccactcattcaccaaagtgggaaactgtttactgtcactcacttattcatcacaatgggaaccttttcactgtcacccacacattcattacatgaggaacctgttcaccatcacccactcattcattacagtgggaacctgttcactgtcagccactcattcacaagagtgggaacctgttcactgtcaccaactcatttaccacagcagaaatctgttcactgccaccaacttactcatcacagtgggaatctgtacactgtccgccactcattcatcacagtgggtacccgttcactgtcacccactcattcattacagaaggaacctgctcattgtcacccactcgttcaccacagtagaaacttgttcactgtcacccacacattcaccatattgggaaagtgttcactgtcagccactcaatcatcacactggaaacctgttcactgtcagacactgattcaccatagtagcaaccagttcactgttacccactcattcaccacgatggaacctcttcactgtaagccacttatttatcacagtgcaaagctgatcactgtcagccactcatttacctcagtagaaaccagtttactgtcacccactcaccacacttggaaactgttcactgtcactgagtcactcatcagagtgggaacgtgtttactgttacacactcattcatcacaatgggaacctgttcaatgtcagccactcattcaccacagtgggaatttgttcactctcattcacacattcaccagagtgataaccttttaactgttagccactcattcaccacagtgggacctgttcttttcacccactcattcatcactgtgagaaccagttcactctcatcaactcactcatcacattgggattctgttcagtgtcagccactcattcatcacagtgtgaaactgctcactgtgagtcatgcattcaccacagtggcaccctgttcactgtcaccaactctttcaccacagtaaaaacctgttcactgtcacacactcactcatcactgtggatacctgttcactgtcagacactcattcatcacagggggagcctgttcattttcaccagcgtattgatcacagtggaaacctgttcagacactcattcaccatagcggaaaacagttcagtttcactcacttgtttaccgcagtagaaacccgtacattgtcagccactcagtcaccactgtgggaacttgtttattgtcagccactcagtcatcacgtgaaaaattgtttactgtcacccactcattcatcacagtgggaacctgttccacgttaccccaccattcaccacactgggaaactcttctctgtcgtcctcccattcatcagagtgggaacgtgttctatgtcatgcactcattcattacaccagaaacccgttcactgttacccactcattcttcacagtggaaacctgttcactgtcacccactcatttaccacagtgggaacctgttcactgtcagtcactaattcatcacactaaaaacttattcactgtcagccactcattcatcactgtgggaacgagttcactgtcacccactcattcatcacagtgagaacctgttcactgtccccacctcatgcatcacagtggtaacctgttcactgtcacccactcactcaccacagtgggtacgtgttcactgtcacccactcattcaccacagcgggaacctgtaaactgtaacacactcagtcatcacagtaggaacttgttcacttttagccactcattcacctcagtgggaacctgttcactgtcacccacacatttatcacagtagaaacgttttcactgtcaaccactcactcatcagagttaagaatctgttcactgtcagccactcactcatcacagtgggtacctgttcactgtcaaccactcactcatctcatcgggaacctgttcactgtcacccagtcattcatcacagagggaacatgttaaatgtcagccactcattcaccacagtgggaacttgttcactgtcactctttcaccacagtgggaacatgtcccctgtcagccactcattctccacagtaggaaccggttcagtctctccaactcacttatcatggttggaaacttttcactgtcaccctctcattgaccacattgggaacctgttcactctcacctactcactcattacaatgagtacctgttcaatgttagccactcattcaccacagtgtgaacctgttcagtgtcacccactcactcatcacaatgagaacctgttcactgtcacacactcaccacattgggaaccatatcactctcacccactcattcaccacagtgggagcctgttctctgtcacacacttatttatcagtgtttgaacctgttctctgtcacccactcactcatcagagtgagaacttgtttgctgtcacccacttaataaccacactgtgaacctattcatggtctcacactcactcatcacagtggaaaactgttcactgttaccacacattcaccagagtggggaacttttcactgtcaggcacgcaatcaccacaatgggaacttgttcgctctcacccactcactcaccaccctgggaatatatttattgtcacccacttattcatcaacgtggaaacctgttcactctcacccactcatttatgacagtgagaaccagttcactgtcatccacctattcatcatagtggaaacctgttcactgtcacccactcgtttattacagaaggaacctattcactatcacacactcatcacagtgggaacctgttcactgccaagcactcattcattacagaaggtacctgttgactgtgattcacacattcatcactgcgggaacttgttcactgtcagtcactcattcaaaccagttcactttcacccaccagaccaccgcagtagaaacgtgttcagagtcaccaactcactcatcagagtggaaacccgttcagtgttagccactcattcatcacagtcaacacctgttcactgtcacccacttattcattacaggaataacttaatcaccgccacccccttactaattacagtagaaacctgtacactgtcatacacttatttaccccagtgggatcatgttcactatcagtcagtcactcatcacatgtgaacctgttccctgtaagccactcattcaccacagttggaatgagttcgctgtcaccatctccttcaacttagtaggaatctgttcaccatcagccactcagtcaccacagtgggaaccaggttactgtcagccactcactcatcacagtgagaacctgctcactgtcaccctctcattcctcacagtgggaacctgttcactgtcacctactcattcaccacagtgggaacttgttcactatcacccactcattcaccacagtgggatcctgttcactgtcactcattcattcatcacagtgggaacctgttcactgtcacccacgcattcattacatgaggaacctgttcattgccacccactcatttatcacagtgggaacctcttaactataaaacacacattcaccacagtgggagcctcttcactgtcacccactcattcttcatattgagaacctgttcactatcacccattcattaattacaggagaaacctgttcactgtcacccacttattcatcactgtgagaacctgtttactgtcacccagtcactcaccaaagtgggaaagtgttcactatcacccacccattcatcatggtggaaacttgttcactgtcgcccactcattcaccacagtggttacatgttcactgtcacccactcattcatcaaagtgggaacctctttacagtcagccactcattcacaacagtgggaacctgttgcctgtcagccactcattcattacagtgggaacctattcactgtcaccgagttattcattacaaaaaaaccctgatcactgtcacccactcgttcaccacagtagaaacctattcactgtcaaccactgtcactccagtggaaacctgttcactgtctgccacttgttcaccacattgagaaccagttcactgtcaataactcactcaccactgtgggaatctctttgtcacccactcattcaacacagttggaacctgttcactgtcaccctctcatccattacaggggaaaactgtttactgtaactccctcattcatcacagtgagaacatgttcactgtcacccagtcactcaccacagtggcaacctattcactgacacccactcactcatcatcatgggaacctgttcactctcacccactcattcactacggttggaacatgctcattctcaccacctcatgcatcacagtgggaacctgttcactgtcaggcactcttttaccacagtgggtacctgttcactgttacccactcactcttcacagtgggaacctgttcactgtcaccaacttattcattacagtaagaaccttatcactgtcaacgacatattcaccactgtaggaacctgttcactctcatcaattcattcaccacaatgtgaacgttttccctgtcagccaaccattccccagagtgggaagctgttcactgtcacccactcattcatcacagtgtgtacccattaactataagccattcatgcatcctgatgggaacttcttcactgtcacccacacactcattacaacctgatcaatgtcaaccattcactcaccaaagtgggtactagttcattctcaaccactaattcatcacagtgtgaacctgttcattgtcacccaatcattcattacaggaggaacctgttcactgtcacccacaaagtcattagattgggaacctgttcactgtcacacactcatccatcacagtggaaacctgttcactgtcaagcactcattcactactgtgggaacctcttcattgtcaacgactcactcaaaactgttggaacctgttcaccgtcacccattctctcattacagtgggaacctgctcactgtcgtcctctcattcatcacagtaagaacctgttcactgtaaaccacatactcacaactgtgggaacctcttcactctaaatcactcattcaccacagtgagaacaagttctacatcagccacttattcaccatattgggaacctggtcactgtcaccactaattcatcacagtcagaacccgttcactataagccactcattcatcacagtgggaacctgttcactgtcatccactcactcatcactttgggaacatattcactgtcagtcaaacattctccacagcaggaaaccgttcactgtcatgcactgtttcattacagttagaacctgttcattctcacccacttactcatcaggatgggaactttcactgtccacctttcactcaccacagtgggaacatgttcactctcacttacacattcaccatagtgggaacctgttcagtgtcaggcactcattaatcacagtgggatcctcttcactgtcagctattcactcaacacattgggaacctattcactgtcacccattcatcacagtggaaacctgttcactgtcagccagtcattcaccacagggacaacatgtccactttcagccacacattcaccacagtgcgaacctgttcactatcacccactctttcattaccgtgcaaacctgttcgttgtcacccaatcattcattgtgggaagaacctgttcactgtcacccacaaggtcattagagtgggaacatgttcactgtcacacactcattcatcatagtggaaacccgttcactgtcaagcactcattcactactgtgggaacctgttcactgtcacccactcactcaaaactgtcagaacctgttcactgtcacccactgtctcattacagtgggaacctgctcactgtcaccctctccttcatcatagtaagaacctgttcactgtaaaccacacactcacaactgtgggaacctattcactctaaaccactcattctccacagtgagaaccagttctatgtcagccactcattcaccacagaggaaacctgctcactgtcacccactcattcatcacagtcagaacccgttcactataagccactcattcatcacagtcggaacctcttcactgtcacccactcactcattacagtgggaacctgttccctgttgaccactcattcaccacagtgggaacctgttcattcacacccactcaatcatcacagtgggaacctcttggctgtcaagcactcactaaccacagtgagaatctgttcatactcacccactcacttaccactgttaaaatctgttcactgccacccattccttctctcagtgagaacctgttcactgtcacccactcactcattagagtgggaacctgttcactgtcacccacttatacatcaaaattgtaacctgttcgctgtcacccactcactgatcaaatcaagaatgtgtcaaaagtcacccagtcactcatcacagtttgaatcttttcgctgtcactcactgactcatcacaatgcaaacggattcactgccaccactcattcatcacagtgggaagctgcacattgtcactcaataatttatcacagttggaacctgttcactgtcaccccactcattcatcacactgcagcctatttattgtcacccactcactcctcataatgggaacctgttcactgtcacccactcacacaccatagtgggaacctgctcactgtcagccactcattctccacagtgggaacgtgtccactcccacccactcattcacgacagtggggaatctattgattgtctcccacccattcatcacagtggtaatctgttcgctgtcacacacacattcatcaaagtgggaacctgttcactgtcatccattcacttatgacagtgagaaacttcactgttagccactcattcaccacagtgggaacattttgtctctcacccaaacattcaccacagtggcaacccgtttactatcacccactaaatctttatggtgggaacctgttcactgtcacacactcattcattacaggaggaacgtgtttactgtcacctactcattaatcacagtgattaatcacattaaacctgtttaatgtcagccactcacttcccacagtggaaacccgttcactttcagccactcactcccaatagtggaaatttgttcactgtcacccactcattcacctctgtagaaacctgttcactgtctcccaattattcgccaaagtgggaaccagttcacggtcacccactcataaatcacactgggaaactgttcactgtcgcccactcattcatcactgtggtaacctattcattgtgagccactcgtttatcacagtgggagccattttactctcacccactcatcgagagcagtgggaagtagttcattgtcattcactcgttcactgcacgagaaacctgtgcactgtaagccactcagtcaccacaaagagaacctgtttaatttctgccactcatccaccacagtgagaatcactgtcattcactcattcaccacagtgagaacctgttcactgtcacccacacattcatcacagtgggaacctgttcactgtcacccactcactcatcgcagtgagaacctattcattatcagacacacattcaacacagtgggaatcttttcactctcactcactcattcaccaaagtgggaccctgttcactatctcccacttattcattaatggaggaacctctttactgtcagcaagttattcattacagtgggaacctgttcactgtcactcactcgttaaccgcagtaaaaacctattcactgtcagccatacgttgaccaaaatgggaacctgtttagcgtcacccacttattcatcacagttgggacctattcactgtcgcccacacattcaccacagaatgaacctgttcactttcaaacactcattccccacagtggtaatcagttctctctcacctactcattcaccacagtgggaaccatttcaccttcaccctctcgctcaccacagtataaacctgttcactgtcagccactcagccactacgattggaacctgtttactctcaggcactcattcaccacagtgggaaccattcactgtcacccactcattcatcacagtgggaacctcttcactgtcacacagtcatttattacagagggaacctgttcaccttcatggactcattcattacagaaggaaagtgttcactgtctcccactcattcattacagtggaaacctgatcactgtcacccactcactcacctctgtgctaacctgtcactgtcagtctgtcactcatcacagtggaaatctgttcactctcacccactcattcaccacattgggaacctgttcaccttaaccagtcactcatcacactgggaagctcttcactgtcacacattcattcttcacattgggaaccagttcactttcacccactcattcaccacagtgtgaacgtcttcactgtaacccactcattcatcagagtgggaaccatttcacagtcactcacacattcattacaaaaggaaactgtttgatctcacgcactcactcatcaaagtgggaacctgttcactgtcacccacttactcactagagtgtgaacctgttcactgtcagccactcattcatcacagtggcagcctactcactgtcagccactcactcaccacagtgggaaccagttcactgtaacccactcgttaaccgcagtaaaaccctgtttactgtcagccactcaggcaccatactgggaacctgtttgctgtgagccactcatccaccacagtgggaagcagttcactgtcacccactctttcatctctgttagaacatgttcactgtcaaccactcatacctcacagtgaaaacctgttcactgtcacccacgcactcaccacagtaaaaacctgttcactgtcaccatctcattcaccacaatgaaaacctgttcaatgtcagccacacattcactacagtgggtacctgttcactgtcagcccctcactcatcacaatgggaaccagctaactgtcacaaactcattcatcacagtgggaaactgttcactatcagccactcattcaccacaaggggaacctgttcggtttcagccactcattcaccactgtgggatcctgttcactgttacccattcattcatcacagtgcaaactttttcactgtttcccactcattaattacaagaggaagcttttcactgtcacccactcattcatcaccatggaaacccgttcactgtcacccacttattcatcacagtgagaacctgttcactcgcccacttgttcaccacattgggaagctgttctcagtcagccacccactcaccacagtgggaacctgttcactgtcacctactcactcatcacagtgggaaaatattcattgttgcccactcactcatcagcttgggaacctgctcactgtcagccacccaataaccacagtgggaacctcttcactctcacccactcattcagcacagtgggaaacttctgactgtcacccactctttcatctctgttagaacatgttcactttcacccactcattcctcacagtgaaaacctgttcactgtcacccactcactcaccacagtaaaaaccttttcactgtcaccatctcattcaccacaatgaaaacctgttcaatgtcagccacacattcatcacagtgggtacctgttcactgtcagcccctcactcatcacaatgggaaccagttaatggtcacaaactcattcatcacagtgggaaactgttcactatcagccactcgttcaccacaaggggaacctgtttactttcagccactcattcaccacggtgggacgctgttctctgttacccactcattcatcacagtgcaaacttgttcacagtctcccactcattaattacaagaggaaacttttcactgtcacccactcattcatcaccatggaaacctgttcactgtcacccacttattcatcacagtgagaacctgttcactcgcccacttgttcaccacattgggaagctgttctcagtcagccacccactcaccacagtgggaacctgttcactgtcacctactcactcatcacagtgggaaaatattcattgtcacccactcactcaccagcgtgggaacctgttcactgtcagccacccaataaccacagtgggaacctattcactctcacccactcactaaccacagtgggaatgggtttaatgtcagccactcattcaccacagtgggaacctattcactctcacccacacattcaacacattgggaacctgttgactgtcacccacccattcatctcagtgggatcctgttaatggttacctacacatttatcacagtgggaacctattcactctcacccacacactcatcacagtgagatacttttcatggtcaatcactctttcaccacagtgggaacctgttcactctcacccactcatacatgacaatggtaacttgttaactgtcacccactaacttatcacagttggaaagttttaactgtcacccattcactcatcacagtgggtacctgttcactgtcacccactcactcatcacagtgggaacctctttactgtgagctactcattcctcacagtgggaacctgttcactgtcacccactcattcaccactgtgggaaacacttcactgtcacacactcattcatcagagtgggaaccctgttcacagtcactcacacattcataacaaaaggcaactgttccctctcatgcaatcactcatcacagtggaagcctgttctttgtcacccacttattcaccagagtgggaacctgttcactgtcagccactcattcatcacagtggaaacctattcactgtcagccactcattcaccacagtgggaacctgttaactctcccccactcactcatcacagtgggaacctgtttatggtcaccaacacatacatcacagtaagacccttttcagtgtcaaccacacattcaccactgtggaatcctgttcactctcacccactcattcattacaacgagacccttttccctggcagccactcatttcccacagttggaacctgttcactgtcacccattcattcatcacagtggaaacccgttaactataagcaactcattcatcacagtgggaacctcttcactttcacccacacactcagtacaatgggaaccagatcaatgtcacccactcactcaccacagtgggaacttcttcattctcaaccactcattcatcacagtgagaacctgttcactgtcacccactcattcatcacagtggaaacgtgttcactgtcatccacacactaattacaatggaaacctgttctctgttacccactcatgcatcacagtgatacattttctctgtcaccaactcactcataacattgggaacatgttcactctcagtcactcattctcctcagtgggaagcagttcactgtcacgcactgatttatcacagtgagaacctgttcactgtcagccactcattcaccacagtgtgaacctgttcactgtcacttactcatccaccacagtgggaacctgttcattgcccactggttcattacagaagaaacctgtttactctaacccactcattcaccacactgagaacctgttccatgtcagccacttatttactacagtggcaacctgttcactgtcaacattcatcagagtagaaatccgttcactataagccactcatttatcacaatgggaacctcttcactgtcacccactcactcattataatgggaacctgttcactattaaccacttgttcactgtcacccatacattctcaaagtggggacctgttcactgtcagccactcactcattagagtgggaaccctttcactgtcttccactcattcataacaattgtaacctcttaactgtccagcactcactcatcacatcaggaacctgttgaaagtcacccactcactcatcacaatgggaatctgttcaatatcacccacttactcatcacagtgggaatgtgttcactgtcagcaactcattcatcccagtgagaagctgctcactgtcacccactcttttatcatagtggggacctgttcactgtcacccactcattcatcacactgggaatctatatattgtcacccattctctcatcataatgggaaccttttcactgtcatacactcacacaccatagtgggaacctgttcactgtcagtcattccttcaccacagtaggagccttttccccctcaccctctctttcaccacagtgggaatctgttgattgtcacctaatcattcatcacagtgggaacctgttcactgtcacccacattttcatcacagtgggaacctgttaactttcaccaactcattcatcacagtgggaacccattcactgtcagccatacattcaccacagtgggaacattttcactctcaccaaaacattttccacagtgtaaacatgttcactgtcacccactgaaccatcatggtgagaacctgttcactgtcacacactcattcattacaggaggaacgtctttactgtcaccaactcattcatcatggtgggaacctgttcaatgtcagccactcattcaccacagtgggaacctgttgactgtcaggcactcatttcccacattgggaacctgttcactgtcatccactcgttcaccatagtagaaacctgttcactatcaccaacttactcaccaaagtgggaacatgttcactgtcacccactaatttatcaaagtgggaaactgttcactgtcgaccacacattcaccacagtggtaacctgttcactgtcagacattcattcatcagaatgggaaccatttcactgtcacccactcattcaccacagtgggaagtaatttactgtcaaccactcgttcaccgcagtagaaacctgttcactgtaagccactcagtcaccacagtgggaacctgtttacagtcagccactcattcaccacagtgggaaccagtttactgtcattcactccttcactacagtggaaatctgtttactgtcacccacacatttatcatagtgggaatctgttcactgtcactcactcatcacagtgagaacctgttcatggtcagccattcattcaccacattaggaatcttttcactctcacccactcattcaccacaatgggaaactgctcactgtctcccacttattcattactggacgaacctctttactctcagtaacttattcatcacagtaggaacctgttcactgtcagccacccattaaccacagtgagaagctgttcactgtcagccactgacacatcacagtggcaacctgttcactgtcacccacacagtcaccacagtgaaaacctgttcattgccaccaactcaattgccaccgtggaacctgttcactctcacccactcatacatcacagcggtaacttgttagctgtcacccactcactcatcacagtagatacctattcactgtcactcacttactcatcacagtgggaacctgttcactgtcagctgctcattcttcacattgggaacctgttcacagtaaacccctcattcatcaccatgggaacctgttcactgtcacccactcatgcatcacactgggatcctattaattttcacccactcactcatcacactgggaacctgttcactgtcactcactcaatccccagagtgggaacctgttgactgtcagccactcactcaccacagtgaaaacctgtttattctcacccactcattcaccacagtggaaacaatttaactgttacccactcctgcatcacaatgggaacctgtcactgtcactcactcattcatcacagtgggaacctgtcactctcaaaaactcagtaatcacagtgggaacctgttcactgacagccactcattcaccattcaccacgatgggaagctgttcactctcacccattctttcaccactgtggaaagcttttcttttttatttttttattattattattattatactttaagttttagggtacatgtgcacaatgtgcaggttagttaaatatgtatacatgtgccatgctggtgtgccgcacccattaactcgtcatttagcattaggcatatctcctaatgctatccctccccccactcccaccccacaacagtccccagagtgtgaagttccccttcctgtgtccatgtgttctcatagttcaattcccacctatgagtgagaacatgcagtgtttggttttttgtccttgcgatagtgtgctgagaatgatgatttccaatttcatccatgtccctacaaaggacatgaactcatcattttttatggctgcatagtattccatggtgtatatgtgccacattttcttaatccagtctatcattgttggacatttggcttggttccaagtctttgctattgtgaatagtgctgcaataaacatatgtgtgcatgtgtctttatagcagcatgatttatagtcctttaggtatatacccagtaatgggatggctgggtcaaatggtatttctagttctagatccctgaggaattgccacactgacttccacaatggttgaactagtttacagtcccaccaacagtgtaaaagtgttcctatttctccacatcctctccagcacctgttgtttcatgactttttaatgattgccattctaactggtgtgagatggtatctcattgtggttttgatttgcatttctctgatggccagtgatggtgagcattttttcatgtgttttttggctgcataaatgtcttcttttgagaagtgtctgctcatgtccttcacccactatttgatggggttgttagttttttcttgtaaatttgtttgagttcattgtagattctggatattagccctttgtcagatgagtaggttgcgaaaattttctcccattttgtaggttgcctgttcactctgatggtagtttcttttgctgtgcagaagctctttagtttaattagatcccatttgtcaattttggcttctgttgccattacttttggtgtttgagacatgaggtcctcgcccatgcctatgacctgagtggtaatgcctaggttttcttctagggtttttatggttttaggtctaaagtttaagtctttaatccatcttgaattgatttttgtataaggtgtaaggaagggatccagtttcagctttctacatatggctagccagttttcccagcaccatttattaaatagggaatcctttccccattgcttgtttttgtcaggtttgtcaaagatcagatagttgtagatatggggcattatttctgagggctctgttctgttccattgatctatatctctgttttggtaccagtaccatgctgttttggttactgtagccttgtagtatagtttgaagtcaggtagcatgatgcctccagctttgttcttttgacttaggattgacttggtgatgcgggctcttttttggttccatatgaactttaaagtagttttttccaattctgtgaagaaagtcattggtagcttgatggggatggcattgaatctataaattaccttgggcagtatggccattttcacaatattgattcttcctacccatgagcatggaatgttcttccatttctttgtatcctcttttatttcattgagcagtggtttgtagtactccttgaagaggtccttcacatcccttgtaagttggattcctaggtattttattctctttgaagtaattgtgaatgggggttcgctcatgatttggctctctgtttgtctgttattggtgtataagtgtgcttgtgatttttgtacattgattttgcatgctgagactttgctgaagttgtttatcagcttaaggagattttgggctgagacaatggggttttctagatatacaatcatgtcgtctgcaaacagggacaatttgacttcctcttttcctaattgaatacactttatttccttctcctgcctaattaccctggccagaacttccaacactatgttgaataggagtggtgagagagggcatccctgtcttgtgccagttttcaaagggaatgcttccagtttttgcccattcagtatgatattggctgtggctttgtcatagataggtcttattattttgagatacgtcccatcaatacctaatttattgagagtttttagcatgaagtgttgttgaattttgtcaaaagccttttctgcatctattgagataatcatgtggtttttgtctttggttctgtttatatgctggattacatttattgatttgtgtatattgaaccagccttgcatcccagggatgaagcccacttgatcatggtggataagctttttgatgtgctgctggattcggtttgccagtattttattgaggatttttgcatcaatgttcatcaaggatattggtctaaaattctctcttttggttgtgtctctgcccggctttggtatcaggatgatgctggcctcataaaatgagttagggaggattccctctttttctattgattggaatagtttcggaaggaatggtaacagttcctccttgtatctctggtagaattcggctgtgaatccatctggtcctggactctttttggatggtaagctattggttattgccacaatttcagagcctgttattggtctattcagagactcaacttcttcctggtttagtcttgggaggttgtatgtgtcgaggaatttatccatttcttctagattttctagtttatttgcgtagaggtgtttgtagtattctctgatggtagtttgtatttctgtgggatcggtggtgatatcccctttatcattttttattgaaaatgatcatttttattgaaaatgataaaggagatattaacctgttaactttcagccactctgttatcacagtgggaacctctccactgtcacctaataattcatcacagtgggaacctcttcactgtgagccacttattccctgttgtgggaacctgttcactctcaatctctaattcaccacagtgagaatctgctcactgtcagccactcagtcatcacagtgggaaccagttcactgtcacctactcgttcaccgcagtagaaacttgtttactgtcactgatacacgcatcacagtggaaacctgtttactgtcagccactcattcaccacagtgggaaccagttcgctgccacccattccttcatgaaaacgagaacctgttcactgtcacccactcattcctcacagttggatcctgtcaccatcattcactcactcaccacagtgggaacctgttcactgtcacccactcattcaccagagtcttaatctgttaactttcatccactctgttatcacagtgggaacctgtcccctgtcacctaatcactcatcagagtgggaacctcttcactgtgagccacttactccctgttgtgggaacctgttcactctcaatctctaattcaccacagtgagaatctgttccctgtcagccactcgttcatcacactggaaccagttcactgtcacctactcattcaccgcaatagaaacttgtttcctgtcaccaaaacacgcatcacagtggaaacctgttccctgtccaccactcatccatcagagtgggtacttgttcactgtcacccactcgttcattacaggggaaacttggtctttgtcacccactcttttaccacagtagaatccttttcactgccacccactcattcaacacagtgggaacctgttcactgtcagccgctcattcatcacattggtaacctgttcactgtcagcgactccatcaccacattgagaacctctttactgtcatccactcaccatcatagtgggaacctattcactttcacacactcattcagcagagtgggaacctgttcagtttcacatactcattcaccacagtgggaaactattcactgtcacccactcattcatcatagtgggaaccttttcactgtcacccactcattcatcatagtgggaacttttcactgtcacccactcattcattacaggaggatcctgtacactgtcatccactcattcatcacagtggaaaccggttcactgtcattcattcactaatcacattgcgaacctgtttacagtcacccactcgctcatcacagagggaacttgttttctttctcacactcattcaccacagtgggaaccttttcactgtcacccactaactcaacacggtggaacctgttaactttctcccactaattaaccacagtgggaatctctacactgtcacccactcactcatcacagtgggaacctgttcactgtcacccctcactcatcacaatgggaacttcttcactttcatccacccactcatcacagtaagagcctgtgcactgtcacctactcattcatcacagtgggaacctgttcagtgtcacccactcactcatcactgtgggaacgttttcactgtcactcactctttcatcacactgagaacctgtccattgtcagctactcactcaacacagtgtggacctgttgactgtcatcaattcactcaccacgatgaaaatcagctcactgtcagccacgcattcaccacagtacaaacctcttcactctctcccactcattcaccacaatgggaacctgctgactttcacacactcattcatcacagtgggaacctggtcactgtcatgtgctcatttatcacagtggcatgctgttcactgtcacatacttactcatcacagtgagaatctattaactattagccacacaatcaccgcaatgggaacctgttcactttcacctactcattcgccacagtgggaacatgtttactgtcactcactcattcatctcagtgggcagtggttcactgtcacccactcattcattacaggggtaacttgttcactgtcacccactcattcaccacagtgggaacctattcactaccagcctctcattcaccacaatgcaaacctgttaacaatcagccactcactcaccacagtggcaacattttcactgtcacccactcgtttgctgtagtagaaagctgttcactgtcagccacacatacaacacagagggaaccttttcactgtcagtcatgcattcatcacagtaacaacctgcacactgttgccctctcattcaccacattgagaacctgttcattttttagccactcattcattgcagcgggaacctgttcactcaccaactttttctccgcagttggaaggaattcaccatcacccactcattcacacactcttccaccccagtagaaagctgttcactgtcagccactcagtcatcacaatgggaacctgtttactatcagccacttgttcaccacagtgggaaccagttcactgttcacacactcattcatcacagcgagaacctgttcaatgtcaccccactcattcatcacagtaagaacctgttcactgtcaccaactcactcaccatgataggaaccagtttactgtcacccattcatttaccagagtggaaacctgttccttgccagccactcagtcatcacactgggaaactgttctcacccactcacttgtcacagtgggaaactcttcactgtgagccactcaatcactactgtgaaaaacctgttcactctgagtcactcgttcaacacagtgagaagctattcactgtcagccacatattcaacaagtaagaacctgtccactgtcagccattcattcacaacagtgggaaagtgttcactatcacccattcagtcatcacagtgggaacattttcactgtcaaaaactcattcatttcactgggaacctgttcactgggaacctgttcactgtcacccactcattcaccatagtggttacctgttcactgtctccaactcactcatcccagtgggaacctgttccctctcacccactcatttgccacagtgggaacctgttcactgtcacccactcatttatcacagagggaacatcttcactgtcacccattcattacaaaaggaacctgttcactgtcacccactcattcatcatagtgagaacttgttcactgtcagttgctcattcaccacagtgggaaccagttaactgtcaagcactcattcaccacagtagatacatgttcactgtcacccactcacacatcacagtggtatcctgttcactgtcagccactcactcatcacagagggtgccagatcactgtcacccactcattcattacaggaggaacctaatcactgtcacccactcgttcaccacagtagaaacctgttcactgtcaaccattcattcaccagagtgggaacctgttcactgtcagccactcattcaccacagtggaaacagttcactgtcacccatttgttcactgcagtagaaacctgcacactgtcagccacacagtcaccacagtggttacctgtttactgtcagccattcacttatcacagtgggaacatgttcactgtcacccaatcatttatcaaactgggaacatgttcactgccaccctctcattcaccacagtgggaacctcttcactgtcgcccactcactcattgcagtgggtacctgtttactgtcacaaacccattcattacaggaggaacctgttcactgtcaaccacatattcatcacagtcagatattgttcactgtcaaccactcactctccacagtgagaacctgttcactctcaaccactcattcaccacagtgggaaactgtccactgtcacacactcattcatcacagtgggaacatgttcactgtcatccactcattcattacaggaggtaccttatcactgtcactcactctttcacaacagtagaaacatgttcactgtcctccaatcactcaccacagtgtgaaccggttcactgtcagccattcgttcactactgtgggtacctcttcactctcacccacccatttagcacagtgagaaccttttcactgtcagccactcattcaccacagtgggaacctgttcactgtcacccattcactcatcacattgaaaatctgttcattgttacccactcactgaccacagggggaccggttcactctcacccactcatcacagtgggaacccgtttactgtcacacacgcattaatcacagtgggaacccgtttattctcacccactcacttatcacagtgtgttcttgttcactgtcagccactcattcaccactgtgggaagctgttccctctcaccaactcactcatcacagtgggtacctgttcactgtcacccactcactcagcacagtgggaacatgttctctctcatgaccgcattaacaatggtgggaacttgttcactgtcacccacacactcatcacattgggaacctgttcactgtcacccactcactattcacagtgggaacctgttcggtgcctttcactcattcatcagaatgggaacctcttcactttcacccactcactcatcacagtaagaacctgttcactgtcacccactcattcatcagggtaagaacttgttcactgtcactcactcattcatcacagtgaaaaccagttcacccttacccactcattccctacagttggaacctgttcactctcacccactaaatcatcaaagtggaaaccttttcactgtcacccacacattcatcacagtgcaaatattttcattctcacccactcattactatgggcaccgcttcactgtcagccacacattcactacagtgggaacctgtgcactctcgccaactcacccaccacagtgggaacctaattactgtcatcaactaactcaacacagtgggaaactgttcactgtcacccactcatgcataacaatggaaacctgttcactgtcagccacttcttcatcacagtgggaacatgttcatttaccacagtgggaagtggttcagtgtcacccattagttcactgcagtagaaacctgttcgttgtgaccaactcacttaccacagtgagaagctgtttactgtcggacactcaattcaccacagtgggaaccagttcactgtcacactctcattcatcacagtgagaatatgttcagtgtcacccactcaataacgacagtgggaagcagttcactgtcaccaactcattcaccacagtgggaacctgttcactctcagtccctcactcatcacagtgtgaacctgttcactgtcaccaactcactcatcacatttggaacttgttcactgtgagccacttattcactatggtgggaacttgttaactttcacccacatattcagcacattgagaacctgttctctgtcagaaactcatccgcagcagtgggaaactgttcactgtcacccaatccatcatcacactaagaatatgttcactgtaagccactcattcacttctgtgggaacctgttcactctcacccactcactcaccacagtaggaacttgttcaccctcacccactcactcatcactgtgggaacctcttcactctcacccacacattcgccacagtgggaacttgttcactgtcacccacttttcaatacaggaggaacctgttcactgtcaccaactcattcatcacagtgggaacctgttcactgtcagccactcattgagcacagtgggaacctgttcattgtcacccagtctttcacaatacaaacgtgttcactgtcacacactcactcatcacagagggtacctgttcatagtcagccactcattcgtcacagtcggtaactgttcactgtcacactctcattcattacaggaggaacctgattactgtcagtcattctacacagtaggaaacggttcactgtcagccactcattcatcacagtgttaacttcttcactgtcagccactcattcaccacagtaggaagaagttcactgtcacccactctttcagctcaatagaaatttgttcactgtcagccactcagtcaccaaagtgtcaagttgtttactgtcagcctctcactcatcactgtgtgaaactcttcactgtcaacaacacattcatcacagtgggaacctgttaactgtcacccactcattcaccacagtgggaatctgttcactctcaccaactcattcatcacagtgggtacctattcactgtcaccaattcacttaccacagtgggatcctgttctctctcacccactaattcaccacagtgggaaccagttcactgtcacccactcattcctcacagtgggaacctgttcactgtcactcactcattaataatatagtaaatagttcactgtcaccaactcattcaaggcagtgggaacctgttcactgtcacccactcactaatcactgtggaaacctgttaactgtcacccactcactcatcacagtgggaaactattcactgtttcccactcattcatcacaatggaaacctgttcactgtcacccactcactcatcacaatgggaaccggttcactgtcacccactcactcatcaaagtaagaacctgtggctgggcacagtggctcacgcctgtaatcccagcactttgggaggcttaggcgggcagatcacgaggtcaagagatcaaaaccatcctggccaatatggtgaaaccctgtctctaccaaaaatacaaaaattagccgggcatggtggtggatgcctgtaatcccagctactcgggaggctgaggcaggagaatcacttgaacccaggcagcagaggttgcggtgagccgagatcatgccattgcactccagcctgggcaacaagagcgaaactccgtctcaaaaaaaaaaaaaaaaagtaagaacctgttcactgtcatccactcactcatcagagagggaacctgtttgcccttacccactaattcaccaccgtgggagcctattcactcccacccactcagtcgtcatggtggaacttgttcactgtcacccacacattcatcatagtgggaacttgttcactctcaccaacccactcatcacaatggctactccttcactgtcagccactcatttatcacagtgggaacctgtgaactctcacctactccctcatcacagtggaacctgatcactgtcacagactaactcacaacaggtggaacctgttctctctcacccacttatttaccacattgggaacctgttcactgtcagccagtcattcatcacagtgggaacatgttcactgtcacccactcactcatcacagtgggaacctattcactgtcacccactcatttatcacagggggaaccagttcactgcaactcactgactcattacagtgggaaactgttcactgtcacccactcacttatcacagtggaaacctgctcaccatcagccactctttcataacattgggtacctgttcactgtcacccactcattcaccacagtgggaagcatttcaatgccacccactcgttcaccgcagtagtaatctgttcactgtcagccactcagtcatcagaacctgtttaccgtcagacactcattctcaacagtgggtacaagttgactgtcaccctctcattcatcacagtgagaacctatttcctgtcacccactcaccacagtgggaacctgttcactgtcacccattcattcaccacagtgggaacctgttcactgtcaaccactcactcttcagagtgggaaccggttcactgtcattaactcactcatcacattgagaatctgtctactgtgagccactaattcactatggtgagaccctgttcactctcaccaacccattcagcactgtgagaacctgttcactgtcagcaactcattcacaacagtgggaacccgttcaatgtcacccaatccatcatcacagtaagaacatgttcattatgagacactcattcactactgtgggtacaagttcactgtcaccttctcatcacagtgagaacctattcactgtcacccactcattcaccacagtgggaacctgttcactgtgagccactcactcttcacagtggcaatgggttcactgtcattaactcactcatcacattgggaacctgctactgtgagccacctgttcactatggtgcgaacctgttcactctcaccagcccattcatcacagtgaaaacctgttcactgtcaacaattcattcacaacagtgggaacttattccttgtcacccaatccgtcatcacagtaagaacatgtttattgtgaaacactcattcactactgtgggaacctgttcactctcactcacttgttcactgcagtagaaacctattcatgctcacccactcactcatcactttgggaaccagttcactcacccactctttcaccccagtgggaacctgttcactttcacccactcattcatcacagtgagtacttattcactgtcacccacccttatcacacgaggaacatgttcactgtcacccacacattcagaacattgggaatctgttcactgccagccactcattcaccacagtgggaacatgttcactgtcaaccttttatttaccacagtagaaacctgttcactgtcatcaacccattcatcacaatgggaacctgttcactgtcacccactcattcaccacagtgagaacctcttctctgtcatccacacattcatcacactgggaacctgttcactgtcacccactcattcattacgaaaggagcctcttcagtttcacccactcattcttcacaatgggaacctgttcaccttcactgccttattcaccatagtgggaacctcttctctgtcatccacacattcattacagtggaaacctgtttattgtcacccacccattcattacaaaagaaacttcttcactttcacacactcatttttcccaatggcaacctgctcactgtcactcactcattcaccacagtgggaacctgttcactgtcagccactcattcatcacggtggtaacatattcactgtcagtgagtcattcaccaaattgggaacctgttcactgtcacccactcgttcactgcattagaaacctgttcactgtcagccactcatttaccaacgtgtgaaactgttcactgtcacccgctcactcaccacagtgggaatcagtttactgtcacccactcattcaccacagtgggaacctgttcattgtcagcctctcactcatctcagtaggaacctgttcactgtcacacactcactcatcacagtgcgaacctgtttactgtcagccactcatgcactacagtgggaacctgttcactgtcacccactcagtcatcacagtgggaacctgttcactgtctttaactcattcattacagtgggaagctgttcactgtcacttactcattcaccacagtaagattctgttcactgtaactcagtcatcacagttggaacctgttcactgtcacaaactcattcattcctttgggaacctgttcactgctacccactcattcaccagagtgggaacctgttcactgtcaccgatacattcattacatgaggaacctgtttactgtcacccactcattcatcatagagggaaactgttcactgtcaatcactcactcaccacagtgggaacctgttcactatcacccactcattaatcacagtggaaacctgttcactgtcagccactcattcgttacagtggttacctattcattgttaaccactggtttaccgcagtagaaatctgttcactgccacacactcattcatcacagtgggaacctgttcacagtcagccattctttcttcacactcagtacctgatccttgtcacccatgcattcaatacaggaggaacctgatttctatcacacattcattcaacacagtagaaacctgttcactttccacattcattcactgcagtagaaaacggttcactgtcagccactcattcatcacagtgagaatgtcttctctgccatccacacattcatcatagtgggaacctgttcactgtaaggcactcatgtactaaaaaaaggaacctcttcacttttacccactcattcttcacaatgggaacctgttcaccttcacccgcttattcaccacagtgggaacctctttgttgtcagcctctcactcatcacagtgggaacctgttcactgtcacccactcactcatcacagtgtgaacctgtttactatcagccactcattcaccacagtgggaacatgttcactgtcacccactcattcactaaagtgaaaagttttcactatctctcactcattcaccacagtgggatccttttcactgtaacccactcagtcatcacagttgtaacctgttcactgtcacagactcattcattcctttgggaacctgttcactgtcacccactcagttatgacagtggggacctgttcactgtcacccacacattcattaaaggaggaacctgttcactgtcccccactcattcattacagttggaacctgttctttaccacccacacattcattacatggggtacctgttcactgtcacccactcatttctcacagtaagaaactgttcactgtcagccactcattcaccaccgctagaacaagttcacggtcacccacactttcaccacagtgggaagctgttcaatgtcacacagccgttcacagcagtagaaacctgttcactgtcagccactcagtcaccacaatgggaacctgtttactgtcagacactcactcatcacagtgggaacctgttcactgtctactcactcattcatcacattgggaacatgttcactctcaccaactcactcatcacagtgagaactttatcactgtcaccaactaactcaccacaggggaagcctgttctctctcacctactcattcaccacagcgggaacctgttcactgtcagccactcatttatcacagtgggaacatgttcactgttgtcaactcactcatcatattgggaacctgttcactgtgagccactcattcactacggtcacaacctgttcactctcacccacccattcagcacagtgagaacctgttcactgtcagcaactgactcacaatagtgggaacctctccactgtcacccaatccgtcatcacactaagaacatgttcactgtcagccattcattcactaacgtgggaacctgttcactctcacccacccattcaccacggtaggaacctgttcacactcagccactcactcatcactgcaggaacctgttcactctcacccaatcattcaccacaatgggaacctgttcattgccacctactaactcattacagtggtatcctgttcacagtcagccactcattcgtcacagtcagtacttgttaactgttacccactcattcattgaaggaggaccctgattactgccacccattcatccaacacagtagaaacctagtcactgtccccacacattcaccacggtgttaacctgttcactgccagcaactcactcactacagtgagaacctgttcactgtcaccgactcactcatcacagtgggaacctgttcaatgtcacccaatcactcatcacagtgggaacttgttcactgtcgcccactcactcatccctatgagaatctgttcactgtcacccactcattcaccacagtgggaatctgttcactctcaccaactcactcatcacagtgggtacctattcactttcagcaaactcactcatcacagtggaaacctgttctctctcaccaactcattcaccacagtggcaacctgttcactgtcacccattcattcatcatagtgggaacccgttcactgtcacgctctcactcatcactgtgggaacatgtttactgtcacccactcattcatcaatatgataaactcttcactgtcaccaactcactcatgacagtaagaaccagttcactgtcacccactctctaatcacagtagaaatctgttcactgtcacccactcactcatcacagtgggaaactgttcactgttttccactcgttcatcacaatggaaacctgttcactgtcacccactcactcatcacaacggaaaccggttcattgtcacccacttactcatcacagtaagaacctgttcactgtcacccactcattcatcacagtgagaacctgttcactgtcacccacacattcagcacagtgggaatatgatcactctcacccactcactcatcacagtgggtaccccttcactgtcagccactcattaatctcagtgggaacctgtgaactctcaccgactcactcatcacagagggaacctgatcgctttcacaaactaacttaccacaggggaacctgtcctttctcacccactcattcaccacattgggtacctgttcatggtcagccactcattcatcacaatgggaacatgttcactgtcacccactcactcatcacagtggaaaccagttcactgtcacccactgattcatcacagtgggaacctgttcactgtcacccatttttcatcacactgggaacctatacattgtctcccaaactctcactacagtgggaaacttatcactgtcatccactcactcatcacaatgggaacttgttcactgtcagccactccttcatcacggtgggaacctgttcactgtcacccacttattcatcacagttggaagctgtacgttgtcagccactcattcaccactgtgggaacctgttcaacctcaaccattcattcaccacagtggaaacctgttcactgtcagccactcattcatcacagcaggaacctcttcactttcacacactcattcatcacagttggaacctgtacactgtcacccactcattcactacagtgggagcctcttcactgtcaatcactcattcatcacagtgggaacctgttcactttcacacactctaatcacagcgaaactatcacccacttatccatcactttgggaacttgttcactgtcacccacttactcatcacagtggtaactggttgactgtcatgcactcacttattacagtgggaacctgttcactgtcgcccactcactcatccctatgggaacctgttcactgtgaatcactcattcatcactgtgggaacctgttcactctcacccactcagtcacctcagtgaaaacctgtacactctcagccactcattcaccacagtgggaacatcttcactgtcacccactcattcattacaatgggaacctgttcaacgtcacacactcattcattgccagagaaacattttcactgtcacccactcatttatcacagatgaaacctgttcactttcactcactcactcaccacaatgagaacctgttcactttcacccactcactcatcacagtgggaacctgctcattgttacccagtcatttatcacaatggaaacctgttcactctcacccactcactcatcacagtgggaacctgttcactgtcaccaacttattcatcacagtgggaacttgttcactctcaccaactcactcatcaaagtggttaccctttcaatgttagccacttattcaccacagtgggaatctgttcaccctcaccaactcactcatcactgtgggaacgtgttcactgtcacccactcactcaccacagtgggaagctgttctctcccacccactcattcaccacagtgagaacatggtcactgtcacccacgcattcatcacagttggaacctgttcactgtcacccactcagtcaccaccatgggaacccgttcactgtcacttagtcatttaccacattggaaaactgttcagtgtcacccacacattcatcacagtgggaacaagttgactgtcacccactcattcattagagtgaaaacttgttcactgtcacccactcactcaccacagtgggaacctgttcactttcatccactcatcacagtgaaaacctgttctctttcacccactcattcaccacattggataactgttcactgtcacccactcattcattacaggaggaaactgtttactgttacccactaattcaccagagtgggaagctgttcactctcacccattctctcttcacagtgggaacctgttcactgtcacccacatattcatcacagtgggaacctgttcactctcactaactcgctcatcacagtgggtacccattcactgtcagccacttattcaccatagtgggaatctgttcaccctcaccaccacactctttacagtgggaacatgttcactgtcacccactcactaaccaaactggaaacttgttctttcacacctactcattcacgacagtgagaacctgttctctgtcacccattcattcatcacagtgggaacctgttcactgtcactcagtcaccacagtaagaacttgttcactgtcacccactcatcataacaggagtaacctgtacactgtcacacattcattcattagagtgagaatgtgctcaatgtcacctgcttaatcaccacagtgggaacctgttctctgtcacccactcacccattacaatgaaatactgttcactctcacccactcattcgccacagtggaaaactgtgcactgtcacccacgcattcttcacagtggaagactgttgactgtcacccactcattcattacaggaggaaacgtttcactgtcacccacacactcatcataatgggaccctgttcactgccagccactctttcaccacagtgggaacctgttcactgtcacacaatcgttcaacacagtaaacacttattcactgtcactcactcatttatcatacaaggaacgtgttcactgtcacccaatcattcatcaaagtgggaaactgttcactgtcaggcactcattcaccacaatgggaacctgttcactgtcagccactcactcaccacagttggaacctgttcactttcactgactcactcatcagagagagaacctgttcactgtcaaccactcattcgccactgtgagaacctgttcactctcacccactcattcattacaatgagaacctgttcactgccacccacttattcaccacagtgggagcccgttcactgtcacatacacattcgtcacggtgtaaacctattcaccataaccaactcattcatcacagtggaaacctgttcactgtcaaccactcactcattactgtgggtacctgttctttgtcattcactttttcaccatagtgggaaccagttcaccctcacccactcattaaacacagtgggaacctgttcgctgtcaccactcattgatcacaatgggaacctgttgattgtcaacctctcattcattacaaggggaacctgttcaccgtcaccactcattcatcaaactgtgaaactgttcactgtcagacacccattcattacagtgggaaactgttcactgtcacccacttgttcactgcagtagaaatctgttcattgtctgcaacttactaagcacagttggaacttgttcactctcactttcttatacatcacagtgggaacttgttcactgtcaccaactcatcaatcacagtgggaacctgttctttttcagccactcattcatcacagtgggaacctattcactgtcacccctcactcaccaaagttgaaacctgttcactgtcacccactcactcatcaaagtgggagcctgttcactgtaaaccactcattcatcaaagtgggaacttgttcattgtcagccacttattcaccacagtgggaacctgttcactctcaaccactcattcaccatagtgagaacctgttcactgtcagcctctcactcatcacagtgggaacctcttcactgtcacccactaattcatcacagtgggaacctcttcactgtcacacactcacgaatcgcagtggaaacctgttcactgttacccgctcacccatcacagtgggaacttgttcactgtcacccattcccttatcaaaatgggaaccaatttactgtcacccactcagtcaacacagtgggaacctgttcactgttacccactccctcatcacagtcagaacctgttgactgtcacccacacttccattacattgggaacatgttcatggtcaacatgcactcatcacggtgggaaactgttcactttcacccactcattcattacaaggggaacctgattattgtcacccactttttcatcacagtgggaacccgttccctttcacccactcattcattacaggaggaacctgtttactgtcacacactcattcatcaaaatgggaacctgttcactttcaaccactcactcattataggcagaacctgtttactgtcacccactcgttcattgcagtgtgaacctgttcactgtcagcaactcattcattacagtgggaacctgtttactgtcacccactcattcaccactatgagaacctgttcactgtaacccactcatttaccgaagtaaaaacctgttcactttcacccacacattcatcactgtgagaacctgttcactgtcaaccacatatgaaccacagtgagaacctgttcactgccacccgctccatcaccacaatgagaactttttttaccgtcattcactcactaatcagagtggcagcctgttaattgtcacccactttttcatcacagtgggaacctgttcactgtcacccattcattcatcacagtggaaatctcttccctgtcacccattcattcatcacagtgggaacctgttcactgttacccattcattctcaacaatgggaactagttcactgtcacccactcattcatcacagtgggaacgtgttcactgtcagccactcattcatcacagtgggaacttttcactctcacccattcattcatcacagtgggaacctgttcactgtcacccactcattcattacaggactaacattttcagtgtcgctgactcattcatcacagtgggaacctcttcactgtcagccacttatttaccacagtgggatgctcttcactttcacccactcattcaccatactagaaaccagttcacagtcacctactaacagtggaattctgtttactgtcagttactcatttatcacagtgggtacttattcactgtccccaactcattcattacaggaggaacctgatcactgtcacccactcattcaccacagtagattcctgttcactgtcacccacttattcatcacagtgggaacctttccctgtcagccactcgttcaacaccgagggaaatatttcattgtctctgactcattcaccacagtagaaacctgttcagtcagccactctgttaccacataggaacctatttactgtcagccactcactcatcacagtgggaacctgttcactgtcacccatccattcatcacagtgggaacctgttcattgcctcccactcattgatcacaggaggaacctgttcactgtcacccactcattcatcacagtgggaaactgttgactgtctcccactcattcaccaaggtgggaatctgttcactgtcagacactcattcattgcactggaaacctgttcactgtcagccactcactcaccaaagtggaacctattcactgtcacccacttatttatcacagtgggaaagtgatcactgtcagccacattcaccacagtgggatattgttgactgtcagcccctcactcaccacagtaggaaacttttcactttcccccattcactcaccacagtgggaacctgttcactgtcacccactcactcatcacagtgggaacctgttcactgtaacctactcattcatcacagtggaaccctgttcactgtcacccactcattcatcacaggagaaacctgttcactgtcaccctctcattcatcacagtgggaagttgttcctctcagccactcattcaccacagtgggaaccaattcactgtcacccacttgttcactgcagcataaaattgctcactgtcagccactcagtcaccagaatgggaacctgttaactgtcactcactcattcatcacactggaaacctattcactgtcacccactcagtcatcacagtgggaacctcttcactgtcacccactcattcaacacagtggcaaccttttcaccgtcagcccctcattcatcacattggtaacctgttcactgtcagccactcattaatcacagtggtaacttgttcactgtcacccactcattcatcacagtgtgaaactgttcactgtctcccactctttcatcacagtgggaacctgttcactgtcacccactcactcaccacagtgggaacttgttcactgtcacccactccctcatcgcagtgggaacctgttcactgtcatcctctcatttatctcagtgagaaactgatcacagtcagccactcattcaccacagtgggaacctgttgactgtcaacctcttactctccacaatgggaacctgttcactgtctcccactcatttatcacagtgggaacctgttcactctcagccacttatacaccactttggaaacctgttcactgtcgcccactcatttaccacagcgggaacctgttcactgtcacccactcactcatcacggtgctaaactgttgactctcacccgctcatttacccagtgggaacctgttcactgtcaccccctcattcatcacagtgggactctgttcactgtcacccactcattaatcatagtgggaacctgtttactctcagccactcattcaccacagtaagaacgtgttcattgtcccccactcgttcaccacagtagaaaccttttccctttcacccaatcactaatcacagtggcaacctcttcactgtcacctactcatccattaccagaggaatatgatcactgtcaccccctcgttcaaaacagtagaatcttgttgacagtcacacactcattcaccacagtaggaacgtgttcactgtcagcactcattcatcacaatggaaaccttttccctgtcagccactcattcaccacagtgggaaccagttcactgtcacccactcaatcactgcagtagaaacctgtgcactgtcagtcactcagtcaccagagtgggaattttttcactgtcgcttaccctttcaccacagtgggaacctgttctctgtcagccactaatttatcacagtgggaacctgttcactgtcaccaacacattcatcactgtgagaacgtgttcactgtcacccacttattcattacagtagaaccctgttcagtctcacccactcactcatcacagtgcaaacctgtttactgtcagccactcattcattacaggagaaacctgatgactgtcatccacaggttcaccatcttagaatttttttcactgtcacccactcattcaccacagtgggaactttttcactttggccgctcatgcatcacagtgggaaccagttcactgtcacccactcgttcaccgctatagaaacctgttcactgtcagccaccctgtcaccacagtgggaacctgtttactgtcagcccctcactcatcacagtgggaaactgttcattttcacccactcatacaccacagtcagaacctgttcactcgcacccactcactcatcacagagggaaccttttcacaatcagccactcattcatcacagtgggaacctattcactgtcaggcattcattcaccacagtaggaacctgttcaattttagccactcattcaccacagtgggaacctgttcactgtcacccacacaatcatcatattgggaacctgttcattgcctcccactcatttattacaggattaacctgttcactgtcacacactcattcatcacagtggaatctgttcactgtctcccactcattaatcacagggggaacatgttcactgtctgacaccccttcaccacagtgggaacctgttcactgtcagccactcactcacctcagtggaacctgttcactctcacccactcattcaccacagtgggaacctgttcattctcacccactcattcaccacagtgggaacctgttcactgtcagtcactcactcatcacagtgggaacctgttcactctcacccactcactcaacacagtgggaacctgttcactctcacccactcattcaccacagtgggaacctgttcactgtcactcacacagacatcacagtgggaacctgttcactgtcacccactcattcattacagaaggaacctattcactgtaacccactccttcatcacagtgtgaacctgttcagccattgctcctggccagaaaagcttttaatcatctactgactgggaacaggaaaaccttttataatctagaacaaagagaatgagtctgcttgccacttacactgcatcaagattttgggatcttaaaccttgggttcataatctttaaactcacaaagggccctctaaactcttgcaatcatactggagatcttaattggagacttttaggtaaatctaagcagagaagcttctcctcaaaagcagatggcaaccttgacattgatagctttctccagaagatcaaaaacaaagacatctcttctatcatgacactcctagttcacttttttaatggctctacaaacaacagaaataaaaaagggatctcttgtgtgcacttttggggtatacttatatatgtaaataatttcacaactaaccttatatatcaacaaacttatgtctggataggtaaaagatgaagggccactataggtgagaaataagaaatgtctcgcattcttgctaaatgtgacatgggaaatttgttgtctcataatataagaaacagaatatttatccactgctcttggagcaatattgacttaaagagaaacttatgcagaataagttagagcacattgccaggaggccattactcttctgagtggtcattattcgttaggtctttctttcaaaggcttagagtaaatgaggctatggttggaaatttatcttccataataggctcaatagcagattctactgtaaaggctatggttacccaatagactttaaaattttttactaaagttgtgctaaataaaagaatttatctagtttacttactggataaacagagaagtatctgtgcagttgctagtatttgtagttgcacatggagaaatacatcgagtattacagagattcagttgtaggggattaatgaacacactgcttggttgaaatgaggagaccacttatctagctaatcatttgatctatttaatcatagttggttggttcaatggggacctcggttaaaaagcatacttcaggctgagcatggtggctcatgcctgtaatcctagcactttgggaggccaaggcaggtggatcacttgaggtcaggagtttgaaaccaatctggccaacatgttgaaaccccgtctctactaaaaatacaaaaattagccagctgtggtgacacaagtctataatcccagctacttgggaggctgaggcaggagaatcccttgaatcccagaggcagaggttgcagtgagccaagatcacatcattgcactccagcctgggtgacaagagcaagacttcgtctcaaaataaataaataaataaataaataaataaataaataaataaataaataaatccatacttcaaactcttgatattattttcctgatagtcaaaataatagtcaccctactgcactctattctctcaaaaattataaatctttgcatgcagtcatctctagaatgccaagtgatctctctttaactggaatgatgaaaacttgaagatgtatttgaccatgagaacaccataacctatgaatgatctgataagaacggaaacctaaaataatgaaaactgagagtgacattaaaactctgaggtttggttacactccgatctatgtgaaaacttaatcaaaaggggggaatctttttaaacaaaattattggaggccatcatcctggactgagcttgttcactgggcccaaacagaccaaaatgaaccaattagtcattcatgctaaatgtgacatagttaaactgaaaatttaaagaaataggtagattctaaaactgaccaggtcttgtttttcttttgcaaacagcagatatcaatacaaggaggtcccatccactgtaatccttttaaacaataataacctgaagtcccttttttcactttacaaaacccacagttctactattttacagtggaaattgagactaaatacatcttttttcttttcttttctttcctttttttgagacggagtctcactctgtcacccaggctggagtgcagtggcatgatctcggctcactgcaacctctgcctctcaggttcaagcaattctcctgcctcagcctcccgagtagctgggactatgggtgcccgccaccacgatgggctaattttcatatttttagtagagatggggtttcaccatattggccaggctggtcttgaactcctgacattgtgatccgcctgccttggactcccaaagtgctggggttacaggcatgagccaccatgcccgtccataagtaaatttttgatggtgacaaagtaatatcgatgtctaaagtttggggttatttctcaaaattgagaagctaaccaaatgagaaatattgttaaattaattatagcctaaagttaaccccttttatgtttaatttcggtcaataggtttttctgtacatagttaactaaaacctaactggatatctaaatagattgttacctattcatgtaccaaccactatgtttgtgccaataaaagaacatcaactgttcaagccatattcaaataaggcaaatcccaaactgtaattaatctggttatttctgtaccacttctattttctgtatgtcactttgcttttcctgtgcataaatcttttttaccatgtggctgtgctggattctctctgaggctactcaggtcccacagactacttaatttgcaaattattatttgcttaattaaactatgttaaatttaatttctctgaagttatttttcttttaaaagttttcaaatgttttctttcatatatatatacaagtatatatacatgtatatatatgtgtatatatatatatttttttgtgtgtgtgtgtgtgtgacagtgtctcactctgttgcccaggctggagtgcagtggcgcgatctcggctcactgcaatgtccgcctcccgagttcaagtgattctcatgcctcagcctcctgagtagctgggattacaggagcgagccaccatgcttggctaattttgtattttcagtagagacggggttttaccatgttggtcaggctggtctcgaactcccaacatcacgtgatctgcccgcctcagcctcccaaagtgctggaattacaggtgtgagccaccacgcccggcctcaaatttgttctatgataaaaaataagtgatgtgttgtagggctttgattatctaaaataagttatgttttccaaattactctatatcagctatgtcagctattttttccaaattattctatgttctttcaaaatgcttttgcaatttcttttttgttttttcattttgtttgaaatagagtctcactctatcaaccaggctggagtgtagtcgtgtaatcaatcatggcttaatccagcttccaccttccggtcttaaacaatcctcctgccctagacacctgagtatcatcatgcctggttaattttttaaatttcttttattgagccaggatcttattatgttgcccaggctgcacttgaactcctgagcttaaatgattctcccatctcagcctcccaagcctcccaaagtattggaattaaggatttaaggccaccatgtgcttcagtaatttctcgagattatttccaataataaatagtactttatgggcacaaatctacaagcaatctggtttttattttagaagtgtcactctccagggttttaagagtctagggcagctacttgagtagtgtgatccatggaggtacataggctttgaagtcagacagagttgatcctgagtcccggcccagccacttagaagctgtgagtgtttggacaatttcttgatgtggaagagttctacagactacatatgcagaaaaagcagaatggactgggcatggtggctcacgcctgtaaccccagcactttgggaagctgaattgggtgaatcacgacgtcaggagatcaagaccatcccggccaacatggagaaaccccatctctactaaaaatacaaaaattagctgggtgtgttggtgtgggcctgtaataccagctacatgggaggctgaggcacaagaatcacttgaacacaggaggcagaggttgcagtgagccaatatcacaccactgcactccagcctggtgacagaatgagactccatctcaaaaaaaaaaaaaaaaaaaaaaaagcagaaggatactgattgcaaatatggtagcaatttttcatccctcctgtatccatgtacattgacaggtgcttttacagccattcccatgaagagtcagaatctattttccaaacgcttgatctggctggccttatttgctcatggcagtagaaacctgagaacatgacaatgtgttggtttggagcctaggctcaaacagttttgactgcttctgcttttcttttctttccttttcttttctctgtttttttctttttttgagaaggagtctttctctgtcatccaggctggagtgcagtggcatgatcttggctcactgcaacctccacctcccagattcaggcaattctcctgactcagccttctgagtagctaggactacaggtatatgctaccacacccagctaatttttgtatttttagtagaggtgaggtctcgccatgttggccagactcgtttcaaacttctgacctaatgtgatccacctgtcttggcctactaaagttctggaattacaggcatgagccagcatgtccggcctgcttctgtttttctttcagaatgctgccatattcatgaaaaaaagcccatattaggccaggcacggtggctggtgcctgtaatcgcagcactttgggaggccaagatggacagatcaagaggtcaggagatcgagaacatcctggctaacacagtgaaaccccgtctctactcaaaatacaaaaaaattaaccgggtgtggtggtgggcacctgtagtcccagctactcagggggctgaggcatgagaatcacttgaacctaggaggtggagcttgcagtgagcagagatcgcaccactgcactccagcctgggcgacagaacgagactccgtctcaaaaaaagaaaagaaaaaagcccatattagccaactggagtataagatactatgaagaggagaagtaaggtatccctgttgacagtcccagaagcagaagctcacctctacaagcacagctgctgctttcctagtcaatgagcagctcatgatacatgtctgaaggagctcagctgagaacagaagaatggccccactgagcccagcctaaatggctgagcatttcaattatgagcaaatcagttttggatggttcattatgctgccatagttaactaatatgtgcacccagtgcagatagaatgccaagatttaataacaggttgattactagttaccttctaacattgggcaccataaaagtactgatatttttcccgatttaaagttagatgtcttgtaagataatgttgagaaatgcagaaatatggccaggggtggtggcttatgcctataatcccagcactttaggaggccaaggcggttggatcacctaaggtcaggagttcaagaccagcctgaccaacatggagaaatcccgtctctactaaaagtacaaaaaattagccgggcgtggtagtgcatgcctgtaatcccagctactcgggaggctgaggtaggagaattgcttgaacccaggaggcagaggttgcagtgagccaagaccacaccattgcgctttagcctgggcaacaagagtgaaactccatctcaaaaaaaagaaatgccgaaatacatgtggacatgtatgcatgtgattgtgcttatattcactcagtttcccacaccacagaagaaaacaggtaaccacagcctgaacattagagtcgaggtcaaatagcaaaataagtttgcctttaatctattttcttcctatgtaaacattaaaggtcaagactgtgaacagatctgaagacatagttttttttctcctgtggcccatcatcctttgctcactgtctgatctctgaaagaaagatgggcaacaggtggtaagcagtggtttacctgtgatttattcctgctgccatcagctttttctatagccactatttgtttcaccctcggaactgaaaagagacgttgataaatagaggctgtcccctcacctgtggcagaaaaggggtgttcaggccctccacccccactgacatcacagctgtacttcaatgtggcagctattggccatgtgtggctcctgggtgcctggaatgtggctggtctgaactgcgatgtgctagaaaggtaaaatacagaattagtttcaaagattttgtttcaaatgtatttatatttcattaataattacatattgctcacatattaaaatgaaaatattttgaatatattgggttaaataaattgctacaatcaattccacttgtttcttctttctttttaaagtttggctactagaaaatttaaaattcacctgtgactcacattttatttcagaggattgcctgttcaaaggaccagaatacaggaaggtcataaaatctaaaattttagaacaattgttgttatactttgttcatttgtgaatagccatataatatattatttttgaatgcatataaattgatacacaaggtaagggcaaatactctctggtgtgagcctggctcagctcaggaaggaagccctgtctgaaaaggctgcagcctaggctgtcactcgctcttctttcagcccagcatctgatcacatcttctgtcactcagggcctgaaaagaaggtgccttaaatatcatccaatcagagacgctgggctgggaaccgtccaatcaggaacgcagctggtgcggatagggcggcttccgggatgtggcggggcctttgtctctcgctgcagcctgagctctaggtcttgttttccctgctttgtgttttctgctcgtggacgcccagcctctgtggccctgtggcctgcaggtattgggagatccacagctaagacgccgggaccccctggaagcctagaaatggtgagagtgccaggtccgccatcccgagggggaaaggggttggttgaaaccggtgggaagcggctgtggcgggactcaggcctccctgtagtcagctccacaatctgcgctccagttctttttgcccagctcggccccagttcctccagccataagatggcggctgcgctgacagccggcccgggcgtcctgtctcttccctgcgcagtgactgtgccctggactggagccctctctgggcagctctgcattcgcagcaccgcgtctctcccagattgagcagggaccacgggagggttgtcaggggagaatcctgactcggggtgcgggttcatgaaagagctttgggctgtggggttcccagttcctctttttttctgttaaaaatgtatggggggacgggcgtggtggctcacgcctgtaatttcagcactttgggaagccgaggcgggcggatcatctgaggtcaggagttcaagaccatcctggccaacatggtgaaaccccgtctcaatttttaaaaatacaaaaattagccgggcgtcgtggcgcgcgcctgcaatcccagctactcaggagtttgaggcaggagaatcgcttgaacccgggaggcggaggttgcagtgagcctacatcgcgccactgcactccagcctgggcaataagagtgaaactccgtctcaaaaaaaaaaaaaaaagatgtataggagtcaccgcaaaaatattaaagaacttaaaaagtggttcaagtattgtagagcactcagctatggtttgtagtttgtggtccatgggaggagcttgaataaaagacttttataaggtgcatgataaaaaaatcaaattagtaattggttaggtacagttatatagtctcttaatttgtacgatcgtgttggcaattttctggttatgtgatcagaatttaattggcagtttatagttggttaagcctgaattttgttttccccgatgtggtaatttactaaaaaatgaaattttagttagatttttttaaaaaggaggaccccagggactagagccacctcagtctaattgcctgccactgaatcattttcacagtccacaggggacttcttttcccctgcatttttcacatatgtctcaagcagggtctcaagtctacttcttactccctgttcttccagattaactctgatttacagtaaaatactaaatttccagtgtcattgacattcccaaatgccaccttcccctctctgatacacattatcaattatttgtcctttattgtacattttatatttcaattaataattcttccacaaaacattggatggcactatttaaaaaattgtcttctgtttgtaaatatttcccatgagaagaaagtgaataataatccctgacaccatattgtaaaaaaatctctgtgtctcttttccttttatcttccctaggcacagagttcttatcagaatattggtgggtcaaggtttccgtttggagactttatggtgtgatgggtcatcagccactcttcagttttttcctggtcctgggttttcagtactgtatggggataaaccaggatgcccaccattgtggctatgttggctagagtgtctagtgaatatcagctcctgggtcattttctctcataggacaacctgaggtatgaagtgtatcctatcaagggagcaggtagatacccagggtctgagtgcagtctcctggtgtactcttcctttgaaaagctaactccttgagacattaaaattgacttcacccagctgggcgcggtggctcacacctgtaatcccagcactttgtgaggccgaggcgggcggatcgcgaggtcaggaatttgagaccagcatggccaatatggtgaaaccccatctctactaaaaatacaaaaattagccaggcctggtggcacacacctgtaatcccagctactagggaggctgaggcagaagaattacttgaacccgggaggtggaggttgcagtgagccaaggtcatgccactgcactctagcctgggtgaaagagcgagactgtatacaaaaaaaaaaaaaaaagattgacttcacccaacccagcttctatttcttggagacacattgagagaaaaatgcagaaataatttttaccccctggattctctaagatttgtgaaagaaaaaatagtatcccaaaagacaaaaaaaaggtcaccccagtgagatggtgcaagaacttgcaaagtaaaatgcacttggggcagtcactggggcatagtgtagtgtctcttgagaggttggtcattgagaactttagtgagcaggagcgggtgggagaatctttcaagtgattgaacggcctgacttgacacataggtcagacacatctcttttctaatcagcactgtccctctgtgggtttgtcaccttgaaaagatttgttcacttattttgacttcagcttcttttaattgtaaattgcatttgattagtaaagtttaaaaggcacaaaaatatttgcacagggtgtaaaagaagtgggttttagaaaaaaattaaaatctaatcatatattccatttgttaagaattctcatttacttgttcctttgtcagagtgagtttaaaaattttctcaggtgtgcttatggctgggtgattttaaacagaattccaaggcttagcttttagaatgttatcagggaaaaaattaggaaaaatctctcttccattttggctgtagaaaataaatagatttccacaagaaaatgtggtatataattggtgagttacatagattcatgaaaacacaaatttctctttttgcagggtaaagttgtgacagtgaatatttctgtcccatatcctgttatcttgatttttaagtttcatgataaattttatgagatgaaacttggtacctcctagaagtgttcccatgactaattgtttactacatgattttttatagaaataataaaataatacatttattgtctgaaaggaataaatgcttttgcttttctaattgaggtataaaatgtaagcaccaaaaattttctttttttatatgaacactgtgtttgagtgatttcattggagttttcagtttcaaaaaccaagggaataaatctgacatggaaattaaagcttgaacccagtgactccaacctaaggctaatattgagcctacaaaaaaaaaagattattaaaggcccagttagttctttctggggagcctcccctgcagatgtcccagcctgctcaccccagccatggaagaagtctttccatcctgagagaagctccaaagccttggaaagctggggccccacaggcagatgcagttaaggttaagatgaaaggaaactgggagggtctcactgatgataaagttttttattgttttgaggcactgtctagactttgtaaaataaaacaaagttagatttgtgtaaaaaaaaaaattgaattccaaaggaatattgcaacaggaggaagtaccaactatatcatctttatggcttgcaaagtttaggcagacaaaggctttgtttcctagggaggagcataaaagattagaaaaaaggtgggaggggagtggcaaatggagtgtgaaaaaaatcagattttagatcagataatgttttaccctgaagtcagcatgttcataggagggacataaaatggggttgtatgttgactcacactcagggtagctcaaagttcaggagcctgtgggaaaaaaataaacttaagtttgattaagaagtattttatttctgtgcgtggtggctcacacctgtaatcccagcactttgggaggctgagatgggcatttcacctgaggtcaggagtttgagaccagcctgaccaacacagagaaaccccatctctactaaaaatacaaaattagccaggcgtggtggtgcatgcctgtaatcccagctactcaggaggcggaggcaggagaatcccttgaatccaggaggtggaggttgttgtgagctgttatcacgccattgcactctagcctgggcaacaagatcaaaagtgtctcaaaaaaaaaaaagtattttatttagaccagtgaagacaaattcagctcatttttttaatgagaaaaggaagaaaatgtgtacagtatgtatctggctatgtgataggtaagaaaagggagtgtcttctaagtcataataagaagggtgtttttggctgggcatggtggctcacacctgtaatcccaacactgggaggctgaggcgtgaggatcacgaggtcaggagttcaagaccagcctggccaagatggtgaaaccctgtctctactaaaaatacaaaaattagctgggcgtggtggtgtgtgcctgtagtcccagctacttgggaggctgaggcagaagaatcgcttgaaccggcaggcggaggttgcagtgagccgagatcatgccactacactccaccctggcgacagagcaagactccatctgagggggaaaaaaagtgtttcttttcataaactgttgctggagcacacaaaggatgacttttattaatcacagctattttccaggattatgtatgtgtttcatttttccccacctctttttttgtcctatacatttctttcatttgacttcttctgggttgtatcttttataataaactacagagtttgctgggttctgtgagtagctctatcaaattattgaactagagggaggttatgggaatccccaaattttaaacagtagctcagaagcataggtgggcctatggggtttgtgactggcatctgtaatgagggcagtgttgtgggactgaaccctgaatcggggtctgtgctgactctgggtggtgtcagaattcaaatttcagataatgagtaggtgctggagaattgctttgtgttcagcaaactctatagatttgataccagaaaaaagatatcacagaggcctggcctcgaatggaactctgggtgtctgggaaggggaggctctgctctcctgtacacaggctgtcacactgcccattgtcttgtgattccaggtctcctcccagggtgactgtggactgaaaacttagaggaaaggacctctgatgacagacccccttttcttgcagctgccaccacaggagtcccacccactcacacacactagacattgacgtgtccacatccctctcaagactagtcatcatcctcaggaatttcaccacagcattgtggatcctagtatttcttgccaaaatcccacaagagtgtctacaagtctcctggcatatcccaacccccagacactgaatctgcagcagcaaactgttttctccaccaacctagggttctggaccacctgttcataatctcatctgcctgcacaggcacaaataaatcagagtacagccccaccgggaccgctgtctgtagcaaaaacctacagtccttccacctacattgcactttaccccacccatgaagtttttttcttttaacttttgattttggttcaggggtacacgtgcaggtttcttatataggtaaaattgtgtcacgggggtttggtgtagattattttctcacagaggtactaagcatagcaccaaaccaatatttattcaaattctccttgtcatctcaccctccacccttactaggcctcagtgtctgttgtttctttctttgtgtacgtgttcttatttagctcttactttttttttttttgagatagagtcttgctctgtcacccaggctggagtacagtgacaggattcactagacaaaaactgatctcttcttttttttttttttgtttgagacaccgtcttgctctgtcacccaggctggagtgcaatggcatgatctcagcttactgcaacctccgcctcccaggttcaagcaattcttctgcctcagcctcccaagtagctgagactacaggtgcacaccaccacacctggctaatttttgtatttttagtagagacagggcttcaccatcttggccaggttggtctcaaactcctgaccttgtgatcccacctcagcctccaaaagtgctgggattacaggcatgagccactgcacccagcctatttctatttctttaaccttgctaagaatacatatgtatcttataataaaattaccctagaaaaccttaaaatatttctttaaatttcttagtatatgttataaaattgagggggcagtggcttggcttaaaaagattaagattacacaaactctgggatttaagtttctcttaggtaagcttaggaaaaacagaactggaaataccctagtggcatagagaacagagttctacatagggtcctctccctgccccagttctgtttagatttaacctatttggaggccttatttaggtctggccccaccctggagtcttgcctcacacaatttgttagaagaaatcaaagttttgggccaggcgtggtggcttacgcctataatcccagcactttgggaggccaaagcaggcagatcataaggtcaggagttcgagaccagcctgaccaacatggtgaaaccccatccctacttaaaaaatacaaaaattaccctggtatgttggcatgcacccgtaatcccagttacttgggaggctgaggcaggagaatctcttgagcccaggaggcagaggttacagtgagctgagatcatgccattgcactccagcctgggtgacagagcaagactccgtcccaaaaaaaaaaaaaaaaaaaaaagaaatcagagtttttgtctggtgaatccttctgcctttctagagttcatgctcacaatttccttaaaccccaaaacagataaatggtaaaaataaagtatgtattttagggtcttaatttttaaattttgtattaaagtgagtgcttgcagaaacattctatttaacaacttgttttctatttttgcaaatccagtagttgctctgcaagtcacataaaattaaatacaaacacagtaaaaaacttctctaaaatacattaaactttcctttctgtattcctctcatctgtctatatttagcttttcttctatgcaattaaaaaaaatcaatgacagagaaacaagaagaaatggaaaggcagggctctttatttaaatcctaagaattattaaacacttaataacatctttcagggtgttatgatgatgaaatcacgtaatgtgttatggccaacacagtgctttttaacatccttttgagtacatagttcctgcttaatatatcttgcattagtacaggtgtacatgttgttgccaaatgcaggcttattcaaacattgctgccttctgtttcctctgtaaactttaatgagccagcaaagaatatgatacttaaggatggagatggattttatttatttatttagagacagagtttcgctcttgctgcccagactggagtgcaatggcacgatcttggcccaccacaacctctgcctcccaggttcaaatgattctcctgcctcagcctccctagtagctgggattacagacatgcaccaccacacccagctaatttttttgtatttttagtagagactgcgtttctccatgttggtcaggctggtctcaaactcccgacctctggtgatccacctgcctcggcctcccaaagtgctgaaattacatgcatgagccactgcgcctggcagagatgggttgtctttatttgtaccagaagtatttggttgtgacaagagtgctgagtgtaagggaacctgtgctgtgcctgctttctctaatgccaataatgagcccaagggaagcaacatcagcactgacagggttgttacctattcatggactcttttcaaacctgcagaatcatattacatagaatggagccaaaattaccaagtgatttataagctcattaaaacttgagaggcaatgcttagctaagtggttatcagcccaggcttctcattaggattccatggccaatttgcagaaatctctttacttgtgccctttccacagattctgtttattgttctagggggaagcagtcatgttgtagtaatgaagtgcctcatgtgactcttaagttgaggccagaatcaagtatgaggtgttccagatacattcatgagttaagttccacctttgcactaaagggtggccgcaggactgtttctgtttggatttggtagggacagagcaatgtggccatattttctttttctttttctttttctttttttttttttttttttgaggtgcagtttcactggagtgcagtggtgcaatctcggcttactgcaacctctgcctgctgggttcaagcgattctcttgcttcagcctcccgagtagttgggactacaggcacatgccaccacgcctggctaattttttctatttttagtagagatgctgtttcatcgtgttagccaggatggtctcaatcttctgacctcaggatctgcctgcctcggcctcccaaagtactgggattataggcgtgagccaccaagcccggccatggcccatattttcattattgtagcagaaattgctggtgtctgtgacaggggagggcacctgagaacaggaaaagtgaaacatattttgatacccatggagcagctcattgttcctgaatctcttccattataaaggacataaatgagtgagctttttctgcaggtcttgatccttctgcctgtgggtctggtggtagcagatgagcagttgatgttgacatctttaaagacatattctcaacatgcagctgtaatttgttcaaagaatctcatctggaaaggattcccagaaaaggaggaaaaagaggaaaaaaatggcttctttttttaaagcaaaacatgtctcagatcaagagctgtgtccactttgcctcctagaatgccatgcaaatcattacttctctattgtattacccctccctaaagagtttaactacttgtaaaaattcttatgatagtcaagggtgtctgaaaagtattttttttctatataccagagccctttctacattctttacattgtggctttttatatgccatgcagaattcctaccacaaatttataatctgcactattaaaaatgttccctttgtggctcttgaacatgaaaaggtgtggatactcaagatttctattgggggaaagctggagtcatttgtaaagatggaaaacatgtaatgttgaggttccatctgtattctccattacctctgtgcaaaacaggatcaaggaaatgcttagttaaacaagatgacatttattacccagaaagttctaaaaaaaaaattatcaggagatacctgctctctagggtgctaaagaaagatgatttaaaattactattacaaattatagacagggaagatatctgtatcctgaactttgcataaaactgattttttaatgttaaaattcagactatagtttggaggagcagtatcacagccgtgatgctgtgtcatttcatgtgcatcaacacatcataaaaatatgtcctaggatgggcgcggtggctcagcctgtaatcccagcactttgggaggctaaggcaggcagatcacaaggtcaggagatctagaccatcctgggaatggtgaaaccccgtctctactaaaaatacaaaaaaaaaaaaaattagccgggcatggtggtgggcacctgtggccccagctacttgggaggctgaggcgggagaatgccgtgaacccaggaggcggagcttgcagtgagctgagattgcaccactgcactccagcctgggcagcagagcgagactccgtctcaaaaaaaaaaaaaaaaaaaatttgtcctagtgcagttcatgttaatgattcacttggttaaagagctctctgacagattttgtcactatagagataattattttttcttcattattatcttaatgcagctaatgtgcataaaccatcacagttaatccagcagctgcccttttttcttagttttttttttttgcatacatctgtctttggaaagtcaaagctcttatctttgtttacaggccagaaaaattaggaaaaacacaggttcttccccttactggatgtttgacaaaatattcttcttggccaaaaacattaaccttactggtgagcttgttagaaattcagacaatcagactttattccagatcatctgaaaaaataatctgcattaacaagttctccagtttattgtacacattaaaatttaaaaagtaccttctaactcaacctgtcttttccatctgaaaaatatacacaactcattctgtagaatgtgtatatggcatccaaaaatacacatttttatgcccttaattttatactatatcatccagaaaagtatcatgtatacactggtattgtggatcttatgccactctcttttcttagagttaaaaaatatattagagaatatttctgtgttaaaaaaattattttattttataattttagtcactcctgtaagtcagaaacagttacctgtactctctcatttcaccttgagtaaaattaaaaatgcttttcataaccagttggtaattatgtgtgtgtgtgtgtgtgtgtgtgtgtgtgtgtgtgtgtgtatgtgtatgtgtgtgtatctttcagggaccattgacatttagggatgtggccatagaattctctctgaaggagtggcaatgcctggacactgcacagcggaatttatatagaaatgtgatgttagagaactacagaaacctggtcttcctgggtgaggataacttcaatacacaatttctaatatgccctaaaggttttatttcttttatttgtggaatgtttttctggtaaagtgtgctttgcataaattagtttcagatccctgttttcaagaaaatcttggggattaatacatgtagaaaagaatttctgcaagatgtttcattttgaccttaactttccaaatttctgagctgatctgtatccttcactgtagattactaaattccacaaatttaatggcataaaatttttgcccacaccttaaaatgtaattgccaacaccaatttttgattcaatagtactggatagtaaaattaagaaactgggccaggcttggtggctcacgcctgtaatcccagcacttcgggaggctgaggcggacggatcacgaggtcaggagatcgagaccatcctggctaacacggtgaaaccccgtctctactaaaaatacaaaaaattagctgggtgtggtggcaggcacctgtagtcctgtagtcccagctactaaggaggctgaggtaggagaatggcatgaactcaggaggcggagcttgcagtgagctgagatcacgccattgcactccagcctgggtgacagaatgagagtgagactccatctcaaaaaaaaaaaaaaaaagaacctacaaatcaaaaatattttttaaatatttgaaaatgtctgttataaattagtattttgggattaatttactagctaagcacattactagattggtcattagagaatatgagcaagatttatattatttatttttaataaaacaggtattactgtttctaagccagacctgatcacttgtctggagcaagggaaagaggcctggagtatgaagagacatgagatcatggtggccaaacccacaggtaggtgaaagtgaaaatgaatacagcagatgacacatgagaggtccaaaggccaaagagaaagccagtccttaaaatgtgatttaggaagctgtgttccaaagaaaatagtttctcagaagcctgaggtttctttctttcttttttgctctcacatgggggcatcttctgtcttatacttttaaattttctaaggattctacttttccttcggtgatcttcaagtttgcagttagagccaaagtcctcttcgtggcatataagagactgcgcagtctggctgctttttcattgttttgggggacacacaaatatctgcataattttgaaaaagtctatgttaagcaatatttttaattgtatttttgcatcatgtttgaaatatgtgagtagtggtttctgttccattgggggtttttttgtttgtttttctgcacattccatcctgtttgtattactacattcttgaaatatagtttgaaattataaagtatgatgcccctatgctttgttcttttacctcaagattgctttggctattcaaagtttattatagtttcatgtatgttttagaattgtatttttcattactgtaaaagatgccactagaattttttttttttttatttcgctcttgttacccaggctggagtgcaatggtgtgatctcggctcaccgcaacctctgcctcagggtttctcaatgttggtcaggctgttctcaaactcccaacctcaggtgatccatgtgccttggcctcccaaagtgctaggattacaggcgtgagccaccatgcctggccaccactagaattttgatagggagtttgttgaatctataggttactttgtataatatgacactttaacaatatttatcctttcaatgcatagacataaaatattttaaaatttatttgtgtcttctctagtttctttctatgatatcttatatcttccagtataaaaatgttttacctcttttgttaaatttgttctcagaaatttattattttgatgctattataaataagattgttttctttatcagatagtttgttttatgtatatggaaccctaatttatacttgtatgttaattttatactttgctaatttactgggtgtatttattagtttagacaggttttaatgtactattcatggttttctatatataagattatatgatctacaaccagcaacttttacttatttgtcttcaatttcaatggctttaaaacaatttttttactaattcttctgccacatacttccagtgctatattaaaatagaaacattgacaatggtattgggaatgggtgcttggtgtcacaaaaatcctttgagagacaaaggatctctcagcaaggctagtttactttctgcagaaagagtacactcgccagcagttttgccaagagaatacactaaacaaaggaggcagggtcatttataacctgatgggtccaccctactgctgtgtccggtttccattggctacaacaggacctcacattctgtatttgtcccagttggctagcaacttagaactttctaaaagaggcaaaggcagaggagaacaaaggaaggagggagcaacttgtggatgctgagaaaggtaaaaacacctccagataaggaataggaacaggctatgacctaatgcttgcttggaccagtataagcatgccagggcaaatatttaggctaaaatgtgggagctaagaacacaaagtacattgatttctttatcacggctagcagatatctaagaatgtcagcacaggtgtttgaatacattttgcttctaagagaagttactatttattcctaattacacgaggaggaaagtccctttgaaaaggaacctctatttcacattttacgatgagcacaatatagttttgcattggtgtatatgaatttgaatgagcaaacagctcttcaagtttttggggtttttttgtttgttttgttttttgggtttttgttttttgtttttgagacggagtctcactctgtcatcaggctggagtgcagtggcacgatctcggctcactgcaacctccgcctcctgcgttcaagtattcccctgcctcagcctcccaagtagctgtgactaaagccgtgcaccacaacgtctggccaattttttgtattttagtagagacgaagtttcaccatattggccaggcgagtctcaaactcctgacctcgtgatccacccacctcagcctcccaaagtgcttggattatagacatgagcctcagcgcccagccctcttcaagtttttataaaccagtttcagaaggtaaagatcttctgttgggcccccagggtgacgggatgccctctgagtttatagtgcagaggaattgtagcttgatcagaaggctgctgggtctgcactagggtccgcctttagttggtttgttataagaggcttgggtagctgtaactcccattttatttttggacaaactgaatatccttcaggacttctatatataaggcagacactagggcaggtttctgcagtcgagtctgctaatggcagggcttatatcaggatgtggatgagtatggctttcactgaataccagagagcatttctctgggacactgtgtgggtttctgtgtaggcagaactggccataaactgtggcttagggagctggaactgagtcattaaactgctttggggaccacagtaaaggccaaggtctgcaggcctgtctgcatgtctataaattgatgtcttcctccaggactctggaagggcagggcctctttcatactgtggctgggaggagtttgggatgaccaagctgggtgggccatttctttggtctatagtcaagaacagagtttctgtagattgccacctgaatgagggcctgccttccgaaacggatactcctcaatcttgggctttagcagtttcacaagtccctccctggatctcaaagctcttagaggcacttattttggagatggggtcttgcttcagaacccagactagtcttgtttttttgtttttgagacggagtctcactctgtcacacaggctttagtgcagtggcatgatcttggctcactcccatctcctcctgggtttaagtgattatcgtgcctcagcctcctaagtagctaaaattacaggcacacaccaccacacagggctaatttttgtatttttaatagagacatggttttaccatgttggataagctgatcttgaacttctgacgttaaccttcccacctcaaccttccaaagtgctggaattacaggcatgagccactgcatttgtcctaggatgctcttgaaatcctggcctgaagcaattctccaacctcagtgtaccatgtagctgtcattataggggtgagccatgatgcctggctctctcataagggcatttttgtcaggattggctgaaaaaattttcttgctgttggggcataagaaagtagggcaccttttatttttccatcttgctgatgttactctctatatacatttttctttctattttccatttcaaacttttctgtaattttagattcagacatttagaacaatatgctagaatttacatgttatgcctgaagtaaattatacaattagtaggcactccatatttactaaaatagttacttataaatttaagtttgctgcaggcaaaacggaattataggatattcacccactttcttcagcctaaatctaaataatagcataatttattcccaaatatttgttttatatatcagaggctctaaccatattctgctatatgtgtgtgtgtgtgtgtgtgtgtgtgtatatatatgtgtgtgtgtgtgtgtgtattttatttagcagtttaaggctatttgcttctaaatttggattgcagcactttcattttgtgtaaaaatgcatatatttaaaacaaaatttatctcgtttcttttaaatgattataaaaagtttctcattacaatattctatttatgcttatactgtattttctctgaaattttactgccatacagtgcctgccaatgattcaaagtacctgctttccatgagtacactgtcaaatattgttgtctagacacattctttcttaatggtacatcaatattgcaaaccagagtttaggagtaaacatttattactgtcttgcagttccatattagtgtgttttagtgtaggcttgttttttgttttgttttttgagacagtcttgctctgtcacccaggctggagtgcagtggcatgatctcagctcactgcaacctctgcctcctggttcaagtgattcttctgcctcagcctcccaagtagctgggactacaggcacacaccagcacggctggctaatttttgtatatttagtagagatggggtttcaccatattggccaggctggtctcggactcctgacctagtgacccgcccacctcagcctcccaaagtgctgagattacaggcctgagccaccactcccaggtagtgtaggtttcttaacatcagtttattgtgttttttgcttttacttatgcattataattttaaataacttgcaattctgtatgtacacgttaagtcaatgtgaggtttaattaagatacaaatcagccatatgtctataacaatctgattatatatgtgtgtgtgcttatctataaatatgacccccagtctggagtgcaatggcacaatctcagctcaccgcaacctctgccttctgggttcaagcgattctcttgcctcagcctcccaagttgctgggattacaggcatgcaccaccacacccaggtaattttgtatttttagtagagacggggtttctccatgttggtaaggcttgtctcgaactcccgacctcaggtgatccgcccacctcagcctcccaaagtgctgggattacagatgtgagccactgtgcctgacctcttagctgattttcagtggttgtttcatcttgtttaagtgagtagttatggagatactcttatttttaccatgcgtttaataatgaatatctatttcctttatgtgaaaaaaaaaaaaacactttgtgatatgaaggtaattcctgaaaggatttataattctatattgttttcagtttttttctttagaaaattgtttttaaaacacataaagtttgtcatcttaaatctattgaagtgtacattttagggccaggcatggttgtggctcacatctgtaatcccagagatttggagaggccaagacaaagaggatcacttgaacccaaaagtttgagaccaccctgggcaacatatggagactccttctctacaaaaaatttctttaaaatggcctggcattttggtgtgcacttgtggtccaagatctttggaagattgaagaaagaggattacttgagcctgggaatttcagactatagtcaaccataattgtgccactgcactctagtttaggtgacgaagtgagaccctgtctccaaaaaaaaaatagctttatatttcaggaatgttaagtatattcacattgttatgcaaaagacttctagaaattttacgtcttgtaaaaccaaactcaatacccattaagtaacagcaacccattttaccctctctggtgctcttgacaaacacccttccactttctgtttttatgagtgtgaccacttaagatatctcatataactggaataatatagtatctataattttattactagcttattttaaagggacataatattctcaaaggttatcttaaattgttacaagataatctgttttaagtctgaaaaaatatttcattatatgtatatgttacattttttgatgtgtttataaatcaagggacatctgggttgcttcagttttttggcttatgtgaatactggtacaataaacatggatgctcaaatatgtctcccaggttctgtgttgcatagttcggatatacattcataaatgtgattgctgtacttaatgataattccagttttaattatctgaggaacatttataacattttaaaataatgactgcatccttgttttccaccagttagtatgagttttattttcattgcatcagcaacaaatttggtgggtttttttatattttatagtggccattctgatgggtgtgaagtgattttgtttttcattgttatttttatgcatttctctacaaattagtaattttgtgtttcctttcttccctccccccactcttcctgccccaggtggagtcttgctccaggctggtgtgcagtagcatgaactgagctcactgcagcctctgcctctggggttcaagcaattctcctcagcctcctgagtagctgggattacaggcacatgccgtcacacccggctaatttttatatttttagtagagacggggtttcaccgtgttggttatgctggtcttgaactcctgacctcaagtgatccacccgtctcagcctctcaaagtgctgggattacaggcatgagccaccgtgcctggccacatttcctttcaaatgctttttcccatttgtgtattctttttgagaaaaatttagttcaattatttgttcatttctaaataaaattattcaactttattgttaagttttacaagttgtttatacattctcaatgttaacttctatgatatgtgatttgcaaatatttttagctatttcctaggaggcattgtcactctattgaatgttttctttgatgcgcagaaactttgaagtgtaatgcagttaaattttactgtcttttctttgttgctcatgcgtttaatgtcgtatctaggaaaatagtgccaagacaaatgtcatgtctttcccccttcatttttatatctgggcattttatttaaaaatatttttcatatgtggttcaaggatataatccatcttcatcttatccatgttgatatccagttttcaacattatgtcttgaagaggttatctttttttctattgtgtgctcatggcaactttacaagatcatttgatcatatacagatttctgtgctctctactctgttctttgtttatctgtttttgtgtcagtaccacattgcttttgttattgtagcttttatattattattattaattttttttttttcctgagacagagtctctcactgtttcccaggctggagtgcaatggcataatctcggctcactgcaacctctgcctttcaggttcaggagtagctgggattacaggcacccacctccacacctggctaattttttgtattcttggtagagacggggtttcagtatgttggccagactggtcttgaactcctgacctcatgatccacctgccttggcctcccaaagtgctgggattacagacgtgagccaccttgctggcctattatgtttttaaatcaggaagtataatgcctctgttctttttcatgggtgtttggctatagtttataatcaaattttaaacaatatttctgtaaaaatatgtggtattgggatttctagttagattatattgaatttgtttgccactgtagtttgtattgacatctttgaaaaattaatttttttgaaacttgggcaagaatatgttgaagggtgtgttttatttttacgtaattttggattttccagttttgcttttaattcctagttgcattcagttttggtcagaaaacacacagtgtataatttttgtctgcttaaatttatttgttgttgttgtcattgttattttgacgcagaatcttactctgtcacccagtctggaatgcagtagcaagattttggcccactgcagcctcaaccttctggggtcaagtgattgttccacctcagcctcccgagtagcttggactacagacatgcagtactatgcctggctaattttttgattatttgtagagacagagtctcactttgttgcccagtctagtctcaaacttctggctccaaatgatcctcctaccttggtctcccaaagtgttgggattataggtatgagcctgttcacccagccagtattcttaaatttaataagatttgttatgtgtcctaacagaatacacaaggtgcaaataagaatgttgtgtattctcttgcttttgactgaaaagttttgtacatgtctgttaatcctagttggtctgtgatgtggtttagatgttcgtgttcttcaaatcttatgctgcaatgtaatcctcactgttggatgtggaacctggtgggagatgtttagatcatggggcaaatttctcatgaatggctttgtactatcctcttggtaatcaaaaagtttacactctgttaattcagatgagagctgcctcattaaaagaacctggccccttcacctcacatttggttctgtcttttactatgtgatatgtccagttactgttggccttccaccattgtggaagcttactgaaaccttccaccagaggcagatgccggcacacacttcttgtacagtctgcccaacgatgaaccaaacaagcctttttatttataaattatccactctcaggtattcctctatgtgcaaaataatatattctgtaacgttgtctaagttttctgttttcttattgatcttttgtctgaattttctatttattattaaaaatggggtcttgatgtctacaattattatgttgctatgtatttcttgtttcacttttgtcaatatttgctttacgtattttggagccctaatgttgtatatacatatacacataaataaataggcataatagttttagattcctggtaaattgatccattttactattgtataatatcagtctttgtctcatgctagtacttgacttaaagcatataatgtctaatataattatgagtgtcttactcaattgtggttatatttgcatgtaataaaaagtttttccattctgttactttcagcttatttgactctatattttccagtttgttattggtattaaatattattttatgttgtgtatctattaacagatttatattttgtttttcatattctatagaggaaatttaagagttttatgcaccattattttgataataaataattttatgtgttgatatatttaatagttttttatttatatatgtttttatgatgctgttcagcatcattttattttttaacataatggactcatttagcctttcttttttattttgtatgcagtgtctcactatgttgctcaggctgatcttcaactcctagtctcaagtaagctgactgccttggcctcttaaaactgtaggatttacaggcatgagccactgcctggcaaccatgtagcagtttttgtaggactgtggtaggggtgatgaataccctcaccttttattttgaaaagtctttatttttatcttgtttttgaagtaaagtaattataattagtagtataattattatatatttttatatacttatatattatattaatatataattataaacatattttcaagtagtattggttaagaattttttattacatcataatttggaaagttctcagcttttttaaatcttcaagtaacctctgtattacttttttgctatattattctatgattttttttcatgaatatattgttctacttgatggtgtccaataagttttacatttcatgttttaattttgttttgcacttttatatttttgcgttttatatttaagggtattccagctcacattagttaattgtgtttggatgttttagtttatattataattgtgtatgaaaatatttaactctgcaatttatgacagtgtgaagcaaaatcaaatatgaatcagccatatgtctattgctaatgtgtttatgtttgcttgcctgtataaatattatttctattttcctataacttgtgtatttattgtgtagtttggttgtgaatggttgtttaatcctgtgtaggtgagtagtcataaaaattcttctacttttatcatcttatttgtgaatctatattatttctgtgtgggagaaacacttttgaattttaagataatataaaaactatcattactctgtatcttaggtatttctgtttatttttacttatcaaaaacataaaatttataataaaatatttgtaaatattcaatttagtgatcttaattatattgacattgttttgcaacatatcaccaaaatgtttttatcttgcaaagctgaatctgaatacacattaaacaactaccaattttttccattttgtagcactttccaaacaccactctgttttccttgtctaaggttgtaactgctttaaatatcctatacaatctctgtctttctgtggctggctcattttatttggcataatgtcatcaaaacttatatttacagttgtcagaatatttcctgctttttgaaaactgagggatattccagtattttgttttctgtttttttgaggtgaagtttcacgctgtcgcccaggctggagtacagagtgcaatggcgcgatctcggctcactgcagcctccgcctcctgggttcaagcaattctcctgcctcagcctctcaagtagctgagattacaggcatgcgccaccatgcccggctcatttttgtatttttagtggaggtggggtttcaccatgttggacacgctggtctcgaactcctgacctcatgtgatccacccgccttggccttccaaagtgctgggattacaggtttgagccaccgcacccagcctattccagtaattttatatttcaaattaaatctgctggatggtttaatgacagaaatttgcattgctttcacccattggctttcagtaacaatgctgcaataattatgggtaagtaaatgactctttatatgacatgtacattacgtatgtactgcattctcttattagtctatgttttcagctttatacttataccaagttgttttaattttgtagctttgtactgtgtttgaaatcaggaagtgtaatgcctcaaacgttttttttttttgaagattgttgggtactttattgtcttttgagattccatatacttctgaggttgctgtttctatttcttcaaaaatgcaatgagaagttttaaaaacattgccttaaatgtgtagattacattgagcagtatgaacatctttacagcattaattataccctgattccatttttatcttaaagagtaatttataaaattttagttctaaaaaatttgttaagacttctttttttgtcctaacaggttgtctatcaaaaagaatgtcgtatgagctattgagaaaggtgtatatcctgatgttactgaggagtgttctctatgcctctgttagaagtaattgttttatattgccttaaagttacctgttgccttctaatattctttttttttattattatagaaagtaggtattgaaatatcctactataaaaattatattgcactctatgtgtttcatcgattctgtcaatatttgttttatatatttggaaccttaatgtgagatatacacatgcacacacacacacacacacacaccccacaaatgtatatagaaatttttcagaggttctcagtgagtgaatctattattgtttaatgtccttctttgtctctttggagttttgactttaaagtacattttataaaatatgacagttttaacttaagatgtgttgtgtaatattacttagacctcttctgctctcatttggttaaaatttgcatggaatgtctacttccatcttgccactttcagtctttctttatcattagatcgcaactgactcttgtagaaaggcaagttgaatcctggtttttaatttttttaataaatccctttattgaaagtatgtcttttaattaaaaagttaactttatgtatatttaattttctgaaacagacttacaaatgttattttattgttttagttgattcttgtttctttgttcccaattttctctctctctttctttgtgtcatttttatttttgtactaatatgctttcactttttaaaattttcttttatatctctatacagatttttttgtggtaccttggggtttacataaaatctctaaaagatgcaacagtatatttaattatggtaaaaaatgaactttagttgtatacaaaaaatctttctcattatatctgccctcaactttcttattgatgttgctaattatatctttatgttgtaagtacattaatgagtgtttataataattagtgtttttatttttcaacttttagagaataactaaaaatgttttctgcaccattatgataatgctaaggaattctaattttggatatgtgcatatctttcccagaaagttatgcatttttatgtaataatatgttgttttcttacattatgttatttttagcatctttgatatgtagggcatatgcagtgccaatacactttttttttttttttttttttttttttttactaatttcaggactattacaatatcacatagttcccttctcgcttgcaaaattttcatgacaaatttactagtaatctcataagactatgcttataaatgacacatcacttttatcttgcatctttgaggattttctactttgtgacttgaaattgcactcatgcatgtgtttgttataaatatctttgtgtgtattctagtttgttgagcttcttcatttttacatcattttttcttatattaaaatttttttgtatttttcacctccacaatttctgttttttgatatttttaatatttttgttgttatcctcattcttctaattttcaattgttgtctgtgtttctattttcctcactgaatattattcaagtttttcaaactaatttgtatatctttatttttaatgatagctttctgaaatttttatgtttctgatggggctatgttgccccaatatttttatatgttgtaatctttcattgaaatttagacattaaaaacaaaccacctgtaacaatctttataatatagctttgtcttggcatatctgaaaccaattgtcttggatagagattctgagagtttctctaacatgttcttaggatgtgtcttgtctgaaatgttttaggtcttttttagttaaaggagtttgttcatgtttcttcttaatagtcagtaatcatttgctacaactatttcctgcctataatattgcagtctctttgctgctgtagcatttacctttgatctcagcagactcaaactgccattccaatgtataccatttatttcaagacagaaaccagtgtctggaaaagtccctagaaaccagaaataaaaatgttttttgccgctatttttcttgtcttttataaaagaaaccaagagttgccaatttacttctaaagccactgtgttacattgggcaaccgaaatagctgtgttgtaaatgtaacaaactttttttttcctatgtggctctttgcattatgctcacctggggcactgcacacacttaactcatttataaattttccacaaatgtattttggtcagtatgtttttgttacatttaaatgtctatgaaggatttagggcctatggtattttgctgtgccatcttacttaatgtagtttgtttaattttatatattacatttgtaaactatcttcatctaagtctagcaagtggagtaatttgtcatttttgtttctttcagttatgtgttctcattttgcccaagacctttggccggagcagaatataaaagattctttccaaaaagtgacactgaaaagatatggaaaatgtagacatgaaaatttaccattaagaaaaggctgtgaaagtatggatgagtgtaagatgcacaaaggaggttgtaatggacttaaccaatgtctcacagctacccagagcaaaatatttcaatgtgataaatatgtaaaagtcgctcataaattttcaaattcaaacagacatgagataagacatactaaaaagaaacctttcaaatgtacaaaatgtggcaaatcatttggcatgatttcatgcctaactgaacatagcagaattcatactagagtaaatttctacaaatgtgaagaatgtggaaaagcctttaactggtcctcaacccttactaaacataagagaattcatacgggagagaaaccttacaaatgtgaagaatgtggtaaagcctttaaccagtcctcaaaccttattaaacataagaaaattcatactggagagaaaccctacaaatgtgaagaatgtggcaaaacttttaaccgattctcaactcttactacccataagataattcatactggagagaaaccctacaaatgtaaagaatgtggtaaagcttttaaccgatcttcaacccttactacccatagaaaaattcatactggagagaaaccttacaaatgtgaagaatgtggcaaagcctttaagcagtcctcaaaccttactacacataagataattcatactggagagaaaccctacaaatgtaaaaaatgtggaaaagcctttaaccagtctgcacaccttaccacacatgaggtaattcatactggagagaaaccctacaaatgtgaaaaatgtggaaaagcctttaatcatttctcacaccttactacacataagataattcatactggagagaaaccttacaaatgtaaagaatgtggtaaagcttttaaacactcttcaacccttactaaacataagataattcatactggagagaagccttacaaatgtaaagaatgtgaaaaagcttttaaccaatcctcaaaacttactgaacataagaaaattcatactggagagaaaccctatgaatgtgaaaaatgtggcaaagcttttaaccagtcctcaaatcttactagacataagaaaagtcatacagaagagaaaccttacaaatgtgaagaatgtggcaaaggttttaaatggccctcaacccttactatccataagataattcatactggagagaaaccatacaaatgtgaagaatgtggcaaagcttttaaccaatcctcaaaacttaccaaacataagaaaattcatactggagagaaaccctacacatgtgaagaatgtggcaaagcctttaaccagtcctcaaaccttactaaacataagagaattcatactggagaaaaaccttacaaatgtgaagaatgtgacaaagcttttaaatggtcctcagtccttactaaacataagataattcataccggagaaaaattacaaatatgaaaattatggcaaagctttaatcaatttacaagtcttactaaacataagaaaatttatactggagagaaactactaacctgaaagatgtgacaataattttgacaacacctcagacttataaaagtaatcatactggtgagaaattctaaaaatgtgaagactatggcaaagtctttaaatggttgtcacactttaggtaagataattcatattggaacaaactacaagtgcaaacaatgtggcaaaacttaatttatgctcacaccttactgcacagaaaagaatttttagttgagaaaaagtatacaaatataaagaatgtggaaaagccgttaatatctgctcacatcttactcagcatcagaaagtacttaataaaagcattataaatggaattactgtcaaaagcattcagaaaatataagcctttaatgtgaaaaagagtaaccattttgaagacaaacattgcaaatttaaagagggttgtagtacctttaattgtatcacaaatcttattgtacagattttgtactagaggaaacccctgaagcagttgcttaaattttgtttaaaatcagatttttttttttttctttttgagacggagtttcgctcttgttaccgaggctggagtgcaatggcgcattctcggctcgccacaacctctgcctcccgggttcaaccgattttcttgcttcagcctcctgagtaactgggattacaggcatgtgccaccacgcctggataattttgtatttttggaagagacagggtttctccatgttgttcaggctggtctcaaactcctgacctcaggtgatccacctgcctcagcctgccaaagtgctgggattagaggcatgagccaccacacctggccaacatcagaggatttatatttgagaaaaaccctgcaaatgtaacaaattttgaaaaactttttcaaaaactacagcttaaaaagcagcagaggattcatactaaaatatatttttgcagatgcagtagatataaaaatatatttaatccaaagttaagtttatgtaaatatcagaggattcacagtagaaatatctaaggtgctggcacttcagacaccacactaaatcagagtgctgagtatagaaaataatccaaaactaaatttggtggattaattatttgtatataactttaaaagaagtagaactttttttgcagagttttaattacattcaaagtatacttttttccttaaaaaagttaggtttttttgaaaagaaaataatcatgtcattcaactttcaaattacttcatgctctttcttcttcattgctattatattcacatgtgaaagcatgtgatcagtggttgctacatcaaagataggagatttttttttcttaggtcattatttatgaccttttctattaaagaataagaacattaggctgggcgcagggctcatacgtataatcccagcactttgggaagctgagacaggcagatcatgaggtcaggagtttgagaccagcctggccaatatggtgaaaccccatctattaaaaactacaaaaattagctgtccactgtggcacgcacctgtaaccccagctactcgggaagctgaggcaggagaatcacttgaacccaaaaggcagaggttgcagtgagccgaggtcgcaccactccacactagcctgggcaacagagcaggactctatctcaaaaaaaaaaaagtatactattctttttttttctttatttattttattttttatttttttattgatcattcttgggtgtttctcgcagagggggatttggcagggtcataggacaatagtggagggaaggtcagcagataaacaagtgaacaaaggtctctggttttcctaggcagaggaccctgcggccttccgcagtgtttgtgtccctgggtacttgagattagggagtggtgatgactcttaacgagcatgctgccttcaagcatctgtttaacaaagcacatcttgcaccgcccttaatccatttaaccctgagtggacacagcacatgtttcagagagcacagggttgggggtaaggtcatagatcaacagcatcccaaggcagaagaatttttcttagtacagaacaaaatgaagtctcccatgtctacttctttctacatagacacagcaacaatctgatttctctatcttttccccacctttcccccttttctattcgacaaaaccgccatcgtcatcatggcccgttctcaatgagctgttgcgtacacctcccagacagggtggcggccgggcagaggggctcctcacttcccagaaggggcggctgggcagaggcgcccccccacccaacttcctggacggggcggcggccaggcggaggcgggccccccacctccctcccggacggggcggctgccgggcggagacactcctcacttcccagacggggtggctgccgggcggaggggctcctcacttctcagacggggcggccgggcagagacgctcctcacctcccagacggggccgcggccgggcagaggcactccctgcatctccgacgatgggcggccgggcagagacgctcctcacttcctagacgggatggcggctgggaagaggcgctcctcacttcccagactgggcagctgagcagaggggctccttacatcccagacgatgggcggccaggcagagccgcgcctcacttcccagacggggtggcagccaggcagaggctgcaatctcggcactttgggaggccaaggcaggcggctgggaggtggaggttgtagcgagccgagatcacgccactgcactccagcctgggcaacattgagcactgagtgaacgagactccgtctgcaatcctggcaccttgggaggccgaggctggcggatcactcgcggttaggagctggagaccagcccagccaacacagcgaaaccccgtctccaccaaaaaaatacgaaaaccagtcaggcgtggcagcgcacgccttcagtcgcaggcactcggcaggctgaggcaggagaatcaggcaaggaggttgcagtgagccgagatggcagcagtacagtccagcttcggctcggcatcagagggagaccgtggaaagagagggagagggagaccgtggggagagggagagggagagggagaaggagaagtacactattacgtatgctccagcctgggtgacagggcgagactccatctcaaaaacaaaaaaggagcgcaccagcatggcacatgtatacatatgtaactaacctgcacaatgtgcacatgtaccctaaaacttaaagtataataaaaaaaaagaaaaaaataaccattgtaccaccaaaaaaaaaaaaaagaataagaacattaaaacgtaagatgcatgatgaaaatctaagtggtggggctctttgtggttaacataatattgagtgatatatgaggtggttgtttagagtaatattcttctgcattatagtaaatgaaaaacatttttaatattagttaaaattagtaatatattattttactaattatatttctatgtaataaaatgcagtacgtttttaaattttcagactacatgtaaacttagttttataattaaacttttttaaacatattatgatcattgtgcattcaacgatgcgttgtgatgccactaagtttaacctatctaccgtactcaagaatgtagttaaaagatggttacagtgtgcaggttggtaacataatgaactaacatctcttttgccagtggctttaaactgcaaataggttaaagaatattgttcttgtaggttaaatttttattctttttttcttatatgaacttatttttaaaaatttttgtgagtacatagtatgtgtatatatttataccatatatagaatattttgatacaggcatataatatgtaacaatcacatcagggtaagtgaagtatccatcacctccagcattaccctttgtattacaaacctattctacacatttagttcttttgaaatgtgcaattgttattggttacagtaaccaatttgcatggaatgtctatttccatctggccactttggcaagtggcaagattttggtcatgattttgttttatggtcataataagaattgtatagaagtattaataaaatccatacatttctgaattctgaataaacatttaaaaatttgttaatatttttctttaaacatgtggtcttactgcctgcaaacacatacagactcttaatttttatttacatagatgtaaatatacacatatattactctaaagataaaccttaagggtaagaaaattataaagtatgtgtgtttttgtgaatatgaatttgtacctatattcagaagaaaagagcaatattggcacaaaacaaatcatcttaataaggtaactaattggctgtgtgcagtggctcacgcctgtaatcgcatcactttgggaggctgaggcgggtggatcacctgaggtcaggagttcgagaccagcctgaccaatatggtgaaaccccatctctactaaaaatacaaaaattacctgggtgtggtggtgtgcacctctagtcccagttactcaggagactgagacaagagaattgcttgaacccaggatttggaggttgcagtgaactgagattatgccactgcactccagcctgggtgaaagagtaagactcatctcaaaaaaataataaggtaactagtttactagaaaactgaatacctcaaaaatgctgaaaacaaatgtatactgtctgctttgtgttaaatttattactgtaatatcttatggtttatagttcagaatcttcccatgcaaatattttgttttgacttgcctgatactcatgctggacctataattttcttttttttataattttttttatagtttctgaggcattatgtgagcttgtcagggattataatgcttttataaaatttagtagtgcacacaaaataatatttatatgtaattccaaaattagtctatcaagttatattttattttcttagaacatttcatttgttcttttaattggagaactctttaaacctgctttagttgttgttcttttcactttttataattgaaataactatatttatttattgagccaatttttttttcaggtaaatactaaggatgctttataagtcatgaggatgtttttatatataaatatagcaaacaaacatgagagtgcttgctgtgtaacaaatgctgcataacaagctataaatattcctgctgaagttagtttgtaacttcaagtcagagatggaaaatatcaatggtgaaaaaataatattgatttttcatgttaaaaagacactttttccaggctacaaaactaactcttgctgaatttgaagagaaattcttcttcctttattttctaagtatcttttgttttattatgtgtattccagctatgtatgcatcacagcccttctccttctttttcagtattatatctatggttttctcattgttgtctttatgccatgtcattttacatggtactttgtaggttttgatgagaaagttggtatttttttaatgtactaaaaaattagttttaactggagagtttgtcaatacaactttcagatcagttaattaagataaaaggcattcagtatccacaggtgagaggaataagtcagttagttttctttttttctgcttgtaaaagaaaaaaaatcttacacaaagtgtggcaaatatttgctaaaaaatatatctcagaaattaaatttttaagaaagctaatggtgagtgaaattttttaaatttaattttctatgatatagcacaacttaacgtttccgtgcagaatcttctatttttaagtgtgaatgttaaagtttgtaaaataataaaatgacctctgtggatttaaaatttggaataatatttcttttttatattgatattacaatttgaaaaaatctctcagtcttatataatttttttagtgggtgaagttcagtctagagtttctattctttgtcacataactgtagccaacttattgatcattttctctgtaaaacttggagatcatgacagcttttggattgaaacatatcctattagtttgctcacaaacttgtttactgtgttcgaagagtggccagtcatgagaccaaagcaacaactgcccttttagtgtcttttatgcagttattatctgtaataaataaatatttattctgtaaaacatgaattttgaagtgtgtatacattgtcaaatgtttaattctaggtaattaatgctttacctcacatagttaacattttttgtggtgagagcacgtgacatagtcttagcacttttcaaaaatacaaatacattattaggaactatagccaccatgctgtagaaaaaatcttttgaaattatttctcctattcaagtataattatgtattttttgactgacgtctttccaaaccccccttctaaataccttggtatctggtggtcaccattttactttctacttccatgagattacgttttttgaggatccgtgtgtaagtaaaattatgaaataatctttctaggccgggtgcggtggcttacatctctaatgccagctctttgggaggccgaggcgggcagatcacaaagtcaggagtttgagaccagcctggccactgtgatgaaaccccatctactaaaaatacaaaaagtagctgggcatggtggcgggtgcctgtagtcccagctgaggcaggagaatcgcttaaacctgggaggcagaggttgcaataagctgagattgcaccactgcactccagcctgggcaacagagcaagactctgttgcaaaaataataataatcttgatgtgcctggcttatttcaggtaatgtaatccatctgactgaaaataatagaattttcttttttgaaggtgagtagtattccattgtttaaatatatcatacttttttttttttctttttgagtcagagtgtttctctgtagcccaggctggagagcaggggtgcaatctcggctcactgcaacctcccgctaactaacttttatatttttagtagagatgagttttcaccatattggccaagctggtcttgaactcctgacctcaagtgatccacccgcctcggcctcccaaagtgctgagattacaggcatgagccactgtccccagcctactatattgtctttatttactcatttgatgttaaactgttgattctatattttgacaattgtaaagagtgttgcaaacaacatagaagtgcaaattttttttattctgattgttttggatatatatccaatattacaattgctgtattatatgatagttttaaattttttgagacttctctattttttatttatttatttttgtttgtttgtttgttttgagatggagtttcactcttgttgccaggctggagtgcaatggcatgatctcggcttaccgcaacctctgcctcccaggttcaatcaattctcctcccttagcctcccgagtagctgggattacaggcatgcactaccacgcttggctaattttgtatttttagtagagacagggtttctccatgttggtcaggctggtctcgagctccagacctcaggtgatccacttgcctcggcctcccaaagtgctgggattacaggcatgaggcaccgtgctcggcctattttatttttataaaggctgttctcatttacactcaaaccaacaatatgcaaacattctttttcctttttctttttctttttttttcaagacggagtctcgctctgttgcccaggctggagtgcagtggcaatctcggctcactgcaagttccgcctcccaggttcacgccattctcctgcctcagcctcccgagtagctgggactacaggcacccgccaccacgcctggctaattttttgtatttttagtagagatggaatttcactatgttagccaggatggtctggatctcctgaccacgtgatccacccacctcagcctcccaaagtgctgacattacaggcgtgagccactacagccggcccccaagcattcctttgtcttcacacctttactaatttttttctttttaataagagttattctaacaagtgagttgatatcatagttttttctcttttttttttgcttttcctggtaataattgatactgattattttttatatctcttgcctatatgtcttttttgaaaaataagtctttaattcatttttaatattattttttattctataattgagtttcttatatattttgatattaaacccttgtcacatgtataatttgtacatattttctcccattttttagttttctcatcctgttgattgtatcagattctgtgcagcaactttttaatttgaagtaatctgactcctctaatttttctttggttccctgggattctgagattaaattttagaaagtcactgcccagaccaatgttatggggctttcactgtatattttttgtagtagtttcatagtttcaagccttacatttaaatatctaatttactttaagttgatttttatatatggtgtgaaatgagggtctcattttattgctctgcatgtggctatacagttttctcaacatcatttattgaagacattgtcatttccctaaaagattgtcacctgttaatataatcagctgtaagtaaatgaatacatttctcatttctctcttctgctccactggcctatgtgtctttttttattgcagtaccatactgttttggttactatagctttgtagcatatttcaaagccaggtagggtaatacattcagccttttttgttttgtttgatcgcttttgctactcagggtcttctgcagcaccatataaattttagatagatatttttaaattcctatgatgtttgtcactggtattttgatagaagttgcattatatttgtatatcattttgtataatgtaggtatttaacaatattaatgccaattcataaatattttcatttgtgtattatttattactttaatattctttagattataatgtaaggtgtttcaactttttggttacatttatctcaaagtgtagttactacagttattgtagataggattgttttttaattttattttgagatagttaattgtttacaaaaatgccactgacttttgcatgtggattttttattctgtaaatttaatgaatttattagtttctagtagttcttagtaaagtcttaggctttcctatacttaagattatgtcttctacaaatagtaataattcaacttttttttccaatctggatgcctttgattttattctctaatttctctgtcttggacatttcgtactatgtttagcaagactgaagaaagtgggcatccttgtcttgttctaactttcagagtaaaagcttacaacttttccctgtttagtatgctgtttcctgtgcactttttgttatatgtggcatttattggcttcaggtgcatttttcctatacttaattttttcagagatttatcattagggaatgtgttaaacttttgttctgcatctatttaaatgttgagttgtgaaatcacagctaactccacataaatacaaaacatcctcagagactactatgaacatctccatgcatgcgaagtaaaaaatttacaggaaatagataaactggatacacacaacctctcaagattgaaccagaaagaagcaaacatcttgaacacagcaaaaattaataaaatgtataatgaaattataaatttagcaatagaaattatacattatattatagaatagtaatagaaatcatacattagtaatagaaatatatacattggtaatagaaaacccgcgaaccatgaatagccctagatcagatgaattcacaactaaattctaccacatatacaaagatgaaccagtactaatcctctgaatgtactccaaaaatcaaggtgggatttcttcctaactatataaaaccagtatcaccttgatatcaaaatctagtgaagacacaacaacaacaaaaactataggccaatattttgggtgatcattaaaacaaaagttctccataaaatactagcaagctgagttcataatcaaatcaaaacgttattttaccacaatcctgggagatttacttcatgaatgcaaggatgtttcatcatatataagtcaataaatgtgattcatcaggtaaagatgattaaaagctaacatgattatcacaatagatacagaaaaggcattcaaaaaatccaatacctataaaaatattctcaacaaactaggtattaaagaaacatctcaaaatagtaaagccatctgtgacaaatctgcagctgaaatcatgctgaacaggcaaaagctggatgaactctccatatgaataaaaataagacaagaatatccactcttaacactcgtattcaacatagttctggaagtcctagctagagcaattaaacaagataaagaaataaaagagatctaaataagaaaagagaaagtcaaattattctcacagatgatataattctctacctgggaaactttggagatgccacaaaaagacccctaagcctaaaaaatgacttaagcaaagtctcaggatacaaaattaacatacacaaatgagtagcatttctgtacatgaataacattcaagctgagaacaaaataaaaaacacagttctggtcgtcagcaaagcctgagtcctgtcctcttgctctcctccctggacagcataagcttcaccactcgctcaaccttcaccaattaccagtccctgggctctgtccaggtgcctggccagtcagcagcacagccatcatctatgcaggcatggggggttctggttccaggatctccgtgtcctgcttcaccagcttcaaggcccatggggttcaggggcctggctgcggggatagccaggggtctgacaggaatgggaggcatccagaacgagaagaccatgcagaccctgaactactgcctggcctcctacctggacagagtgaggagcctgaggaccaagaaccggaaggtggagagcaaaatctgggagcacctggagaagatgggacctcaggtcagagacaagccattacttcaagaccatcaaggacctgagggctcagatcttcacaaatactgtggacaatgcccacatcgttctgcagatcgacagtgtccgttgtggggaaaagaaagagagatcagattgttactgtgtctatgtagaaaagcaagatagaagaaactccattttgatctgtactaagaaaaattgcttctgctttgagatgctgttaacctgtaactttagccccaaccctgtgctcacagaaacgtgcgtaatgaatcaaagtttaatggatttagggctgtgcaggatgtgccttgttaacaatatgtttgcaggcagtatgcttggtaaaagtcattgccattttccattctaaattaaccagggacacaatgcactgtggaaagctgcagggacctctgcccaagaaagcctgggtattgtccaaggtttccccccactgagacagcctgagatatggcctcatgggaaaggaaagacctcaccatcccccagcctgacacccataaagggtctgtgctgaggattagtgaaagaggaaggcctctttgcagttgagattagaagaagtcttctgtctcctgctcatccctgggaatagaatgtctcagtgtaaagctggccattcccattcattctcttctgagataggagacaaccgccctgtggctagaggcaagatatgctggcagcagtactgctctgttgctgtttgctatactgagatgtttgggtaaagagaaacataaatctagcctacgtgcacatctggacacagtacctttccttgaacttattcataatacagattcctttgctcacatgtttccctgctgaccttctccccacctgttgccctgttacactctcctcgctaagatagtaaaaataatgatcaataaatactgagggaactcagaggctggcgccagtgtgggtcctctgtatgctaagcactggtcccctgggcccactgttctttctctgtactttgtctctgtgtcttatttcttttctcagtctctcatcccacctgacaagaaatacccacaggtgtggaggggctggcccccttcagtccatcttgctgctgatgactttagacccaagtgtgagacagagctggccatgtgccagtctgtggagagcaacatccatggctttgcaaagtcattgatgacaccaatgtcactcggctgcggttggagacagagatcaaggttctcagggaggagctgctctttatgaagaagaaccacaaagaggaagtaaaaggactacaagccaaggtcgacagctctgggttgaccagggaggtagttgcccccaaagctcaggaccttgccaagatcatggcagacatccaggcccaatacgacgaggtagctcagaagaaccgagaggagctggacaagtaccagtctcagcagattgaggagagtatatagtggtcaccacgcagtccaccaaggttgtagctgctgagatgatgctcacagagcttagatgtacagtccagtccttgaagatcgacctggactcaatgagaaatctgaaggccagcttggagaacagcctgagggaggtggaggcatgttaagccctgcagatggagcagatcaacaggatcctgctgcacctggagtcagagctggtacagaccctggcagaggggcagtaccaggcccaggagtacaaggccccgctgaacatcaaagtcaagcaggaggctgagatcgccacctaccaccgcctgctggaagatggcgaggacttcaatcttggtgatgtcctggacagcagcaactccaagcaaaccatccaaaagaccacaacccgccagatggtggatggcaaaatggtgtctgagaccaacaacaccaaagttctcagacattaagccagcagaagcagggtaccctttggggagcaggaggccaataaaaagttcagaggtaaaaaataaaagaacagaattctatttacaatagccaaaaacaaaaaataacatacttaggaatacattaaacgaaggaggtaaaatatcgctacaaagaaaacacactgctgaaagaaatcagacaaaacacaaataaatggagaagcatttcatgcttatgaatttgaagatttaatataattaaaatgtccatgccacttaaagcaacctgcagatttttattcctatcaaactatcagtgccatttttatagaaatagggaaaaaagctattctaaaatttatatggaagaataaaaaaagccaaaatagccaaggcaacattaaacaaacaaacaaaataaaacctggaggcctcgaattacctgacttcaaactgtgctacaagctacagtaatcggtataacatggtcgtggtacaaaaatatacatacagactatattggtacatttttatgctgctaataaagacacacctgagactgggtaatttataaaagaaaggtttaattgactcacagttccatatgactggggaggcctcacattcatgatggaagccaaagggaaagcaagacatggcagcaggcaagagcaagcatgtgcagaagaactcccttttataaaaccatcagatcttaaaagacttattcacgacccagagaacagcatgggaaaaacccacccccatgatttaatcacctcccacccagaccctccaatgacatgtggggattattacaattcaaggtgagatttgggtggggacacagagccaaaccatgtggaacagaagagagagccctgaaataaagctacactcctacaacctacttttgacaaagtcaacagaaataaaaagaaaataactccctatctaataaatgatactgggaaaactcgttagtcatatgcagaagaagaaaaaaaactcttcctcccaccatataaacaatatatctcaatatagtttaaagacttaactgtgagacttcaagctattaaaactctagaagaacatgcagaaagtactcttctagacacagggctctagaaaaaaaattataactaacaccttagaagttaatgcaacaaaaataaaaacatgttgaggttgtggagaaaagggaatctatatacactgttggtggaaatgcaaattaattcagcccctgtagaacacagtttgaagatttctcaaatagctaaaaatagaatagctatttggcccattaatcgaattactgggtatatacccaaagaaaaaattattttaccaaaaagacactggcactcacatgtttactgcagcactattcaccataaaaaaagacagaattaaagtaggtacccatgaatcttagattcatgttctttgttaatttgcttagaataaaggccttctgccagcttggaggacagcctgagggaggtggaagcccactatgccctgcagatggagcacctcaatgggatcctgctgcacctgtagtcagagttggcacaggtccaggcccaggagtacaaggccctgctcaacatcaaagtcaagcaggcccaggagtacaaggccccgctgaacatcaaagtcaagcaggaggctgagatcaccacctaccgccgcctgctggaagatggcaaggacttcaatctaggtgatgccctggacagcagcaactccatgcaaaccatcaaaaagaccaccacccgccagagaatggatggcaaagtgctgtctgagaccaatgacaccaaattgagacattaagccagcagaagcagggtactctttggggagcaagaggccaataaaaacttcaaaggtcaaaaaaaaaaaaaaaagaataaaggccttctgctgcatccatgttgctgcaaagaacatctttttctgtggtttcttagtattgcacggtatatacgtatttcagatactacatgttctcacttataattgggtgctaaacattgggtgaacatggaaacaataaatgctgggagttcttaaaaaaactgccaagaccagcattgaaaaactacttatcaggtatgaggtacactacttggacaatggaattattaagtgcccaaacttcgacatcaggcagtatacttatgttacaaatctgcccatgtaccctcatgaatctaaaataaaaataataaaatgctttgtggtataatggcatgttatatttctccagttctgggttaatagttgaaattaggagtgaaagacacagaattatgtccgttttgggtacagaggtgaatgtttttatacctggtcgccccacgttttatgacctaacgtctctgaaaacccttggtttatagcccaaaaagtgtcttatccccaagtatgcagctaaaataaatggccacatctttatattgtatttattaactgtacactagattataatttgtcactctactctttttggggaaaaaatggtttaatcacatttctcttttagaataaaccatttttgaaaatgtgaggctgtgaaaatcatgttaaattcctgaattaggaaaataattttttttcttttttgtggagtctagctctgtcacccaggcttgagtccagtggcgtgaactcagctcactgcaacctctgcctcccaggttcgagcaattcttctgcctcagccctctgagtagctgggattacaggcacctgccaccatgctcagttaatttttgtatttttagtagggatggggttttgccatgttggccaggctggtctcaaactcctgacctcaggtgatctgtctgccttggactcccaaagttctggaattacaggtgtgagccactccacctggcaagaaaacatttatttttaagcataaaagtcttatggtcatagaccaaaaatgacaaagtacacggtatgggttatttatgaccacactgctgcaaccactctatcacaaccattctggtgaaataataataataataataatggattagaaggtacttttagaatatctttctgattctattgcaatgttaaattcttgtctttattatttgtcatatagaagtctgtacttcaacaaaagatgccaagaatttcaagttaatatcctcacacatatattctcactagaagggcactggtgtgtttgcaatcagggtggagcatttctggctttgcttgtgctactttgattgtctaaaatagaaagacaggaagtaaagtggagtcagccatgacatattgagcttctacagcaacaacatctgaattcttgtgttacgtcaactagaagtaatgacagtattttattttattttgttttatttatttatttatttagagacagagtttcactcttgttgcacaggctggagtgcaatggtgcgatcttggctcaccacaacctccacttcccaggttcaagtgattctcctgcctcagcctcctgagtagctgagattacaggcatgcaccaccacacccggctaattttgtatttttagtagagatggggtttctccatgttggtcaggctggtctcaaactcccgacctcaggttacctgcccacctcggcctcccaaagtgttgggattacaggcacaagccaccacatccggcctgttattttactatatttatttttaaaattgtaattcatttatcctgaatatatcactgggcccagaacctaggtgatgtgactctcctgcattatctctgcccataagtgggattattaaatatacctgggcctacataggtatacagatgctacaatgactcatatacctggacacagccaagagaagagattttgactctcataggttggcttacaacaatggataaggtcctgggtctcctacttgtaccaaagtcaaagagaataacaacattcacacatatcatataaattcctcaagtggcaccaaaagtgtcaacagggccaaccatgctgaagagactgtgactctcctatgcacacccagctgactgtaaggactgtcacccttccagatggacacagaccactgtggaggttttgaatgtcacaccaagagtgagtcaaaggttggaattgtgactctcacacatggatgtggtccacaggtggaataatgactcttggacctcaggtggaattggggctctcatgcagggattcagtccagcattcagactgctttgcattcttggacccaacccacaggagatactggctctcatacataacccgggatatgtgcaggattgtaaatgtcatccctggacctttctgcgggtgtaattgtgacagatatttttgcctagaatctgaatgatttgactctcctgcctgggccaagcccacaaatgtgattgtgacatatactcaggccaagcacctaggttatgtgactctcctgcctgagccctgccctcaagggaattgtgacatatcattgaacccagcacctaggtgatgtggctctcctctcctgcctgggccctgcctacagagaaaattgtgacatattcctcgacccagcactcagataatgtgactctcctgcctgtgcactgcctacacagggcatggtggcctatcgccaggcccatcaaccatgtgatgtgaatctcctctctgcctgagccctgccctaaggattgtaaaatattgctgggctcagcacccaggtaatgtaaccttcttgctttagcactgcccaaaggagaaattgtgacatctatctgggccaatcttctaggtgatgtgaatctcctctcctgccccctccctgctctgggactatgacacattactggactcagcacctaggcgatgtgactctcctctcctgtctaggacctgcccaattggtgactgtgacacatcactgggcctagcacctaggtaatgtgactcctcttttgcctggcccctgaccacaggttgcattgtgacatatcactgggcccagcacccagatgttactcttcttctgcctgggtttgttcacagatgggattgtgacatgtgcctgagcccagcatctaggtggtgttagtctcctctcctgcttaatacctgccctgggtaccgggcaaggcaatatgtcacaatgccccctgagatcagggcccaggaaaaaagtcacatcacctgtgtgctgtgcccagtgatgtgtcacaatgtcccctggggaatagagttcaggaaggagagtcacatcacctacatgctgcatctagtgatatatcactttcctgcctaggctctgcccacagaaggctttgtgacagatctatgggcctgtaatctaggtcatttcacttattttggggggaccttatgcacaaaagattgtgacatatttctgggcacagtacacaggtgaggtgacactcctgcctgggcctggcccacagaaggaattatatcactgcttccatcacctaggtgaggtaactcacctctcctgcctgggccctgcctaccggaagaattgtgacataacactgggcccagcacctaggtgatgtgactcttttgccttgttccttcccacaggtgagagtgcgacatacctgggctcaactcacagctgtgaaaataactcattcttgtacccagccaataggagagattttgattctcatagatacatttagggcaactggtaaggtcctgggtctcttacttttatgaagataacagaggattatgacactcacacatatcatataaagcccttgagtggtacagagagtgtcagaacataggagcagggcacagtggctcacacctgtaatcccagcactttgggaggctgaggcgggcagatcacctgaagtcaggagtttgagaccagcctggccaacatggtgaaaccccgtctctactaaaaatacaaaaattagccaggtgtggtggtgcatgactgtaatcccagctactcgggaagttgaggcaggagaattgcttgaacccgggaggcagaggttgcagtgagccgaggttgcgccattgcactccagcctgggtgacagagcaagagtccgtctcaaaaaacaaaaacaaaaacacagcactcagatgagattatgactctcatattcacactcagctgccagaattgtcaccctcaaacatggacacagcccactggtgaggtcctggatctcacaggagtacacagttggaattgtgactgtcatacgtaggcctggccacaggtgtgacgctgactcatttctggacacagcacacagggacaatgatgactttcatacctgaacccaaccaataggagagatgttgactcttgtacctaggacaatgagtaagatcctggctccataccagcacaaatttccagagcagatagcaactgtcttgcacactgtataaagcccttgggttacacagagtttcataacatggcccagcacacagaagcgattgtgactctcatatgcacacccagccaacagtaaggattgtcaccctctatcataaagccaccccgctgtcgaagttcttaatctcacacctggattcagtcaaaagttgaaattgtgactctcctacgtgaatgttttccacagttggataatgactctcagaccaggattcagaacactggtgaggctgtgactcctttactgaaacacagtcccctgcaggcaggattggggatcttatgcacaaatccagctaacccttaagactgactcatgtacttggaccaaactcacaggcattgactctcatacctgaagccaggacatgtgtggaattgttaagctcttctctggacctttccacagatgtggttgtgagatatatctttgcctagtacctgagtgaggtgcttctcctgcctgggtctggctcctaaataggattgtgagatatacctgggcccaagctctcaggtgatgtgactctcctgcctgggccctgtcataatgggggattttgctataatgctggacatagctaggtgatgtgactctcctgtcctatctgggctctgctcacaggtgagattgtgacacatcgctgagcccagcacccaggtgatatagctctgctgcctgggccctgcccacacagggcattacggtatattgccgggccaaacacccagtaatgtgactctttttctgggccttgtcctcagggtgcatggtgatatatcactggatctagcacacaggtgatgtaaatctcttgcctgggtcttgcccgtaggagatattgtaacatatcgctgggctcagcactcaggtgatatgcctctcctgccagggctctgcccacagtagggattgtgacatattacaggggccgacacctatgtgatgtgtctccttttctcccttggtcctaccctcaaagaagattgtaacttattgctgggccaagcacccaggtgatgggacacttcttcctgggccctgcccacagaggaaattgtaacatatttctgggcccagaaccaaggtggtataattattttgccttagctttgcccacaaaaaggattgtgacatattcctggcccagcatccaggttatgtggctctcttgccctgtctctgcccacatgtgggattgtgacatatcagtgggcccagaaccaaggtgatatgagtctcctgtctgtgctctgcccacaggggagattgtgacacattggtgggctcggcatccaagtgatgtgagtgtcttgcttggattttacccaaagagagtattgtgacacacctgtggatgtgacttttctgcttgatccctgcccacatttgaaattggggcctacacctgtttccatcacctaggtgatgtagctctccttcctggtccctgtccaaagggaggattgtaacacacctgcttccagcacctaggtaatgtgactttcctgcctgggccctgcctccaggtaattgtgacatatacctgaacccatcttctgagttgtgttgctcttcctcctgggtcccacccagagggtagattgtggcatgtacctgggtccagcacctaggtgatgttacactttgcctggacctagaacacaagaaaagattttgacagatttcttaccacagcacctaagatatgtgactccgctgcctaggctaaagccacaagtgggattacataatactgggccgagtactgaggtgatttgagccttttttaggtcaagttctcagggggactgacatatacctgggctcaggaattaaggtgatgtggctgtcctgcatgggcccaatccacagagaacattgtgacatatacctgggcccagaccataggtcatgcgactctctcacctaggtcaaggccacaaatgggatagtgacatatagttgaaccaagcacctatgtgttctgactctcatgcctggccaaagtcacaaggggcattgtgacatatacctgggcccagcacttagatgatgtgactctttagcctgagcccaccccacagggagtattgtgacacatacctgggctcaacacctatgtgaggtgtacatctaacctgggccaagccaacaaaagagattgtgacaatataccagggctaagcacctagacaatgtgtctctcttacctgggacctgcccatagtggggattgtgacacatacctggtacctaggctatgtaactcttctgcctgggctgaggccataggtgggattgtgatgtagagctaattccagaacctaggtgatgtgaatctccaacatgagcccaagcaacaggagggattgtgacacatacctgggcccagtacctaggtgatgtggctctcttgcttgggacctgccaaacaggggactttaatatacctgggccccacacctaggtgatgtgactcttctgctgggcctcgaccataagagagattgcgatatatacatgggcccagccttcaggtgatgtagctcttctgcctgagccaggctcacagggggaattgtaagatttagctggacccagctcacaggcaatgatgactctcatacctggacccagtgaagaggagacattctgactctcatagctagccttaaggaaataggtaaggtcatggatctcatacttgtacaaaagtcacagagaggtttgtgactctcaagcatatcacgtaaaactctcaggtggtagagtgtcataacagtgcccatcacgcaagtgagactgtggctctcatgcactcccagttgaaagttaggattgttactcttacacatggacacagctcactagtgaggtccccaattttatagccaaacatactggacagttggaattgtgactcttctatgtgaatcttgacacaggtgggatggtcattcatttttggaccaagcccacaggcatgatcatgagtctcatacctggacccagccaataagaaacatttttggccaggtgcggtggctcatgcctgtaatcccaacactttgggaggatgaggtgggctgattacgaggtcatgagtttgagacaagcctggccaatatgatgaaaccctatctctactaaaaatacaaaaattagccaggcgtggtggcacacacctgtagtccctgttacttgggagactgaggcataagaatctcttgaacccggaaggcggagtttgcagtgacctgaaatcgcaccatcgcactccagcctgggtaataaagcgagactctgtcttgaaaaagaaaaaaaaaaaagaaacattttgactcttctgttgggcttaaggccacaggtaagatcatgtgtctataccatcatgcaggtctcagggaagattgcagctctcatgcatgctgtataaagcacttggttggtacatagagtgtcataaaagaacccagcacacaggaaaaattgtgattcttgtatgcatactcaaccaaatgttagaattatcagcctcacacatgcacacaacccactgttgaggttctgaatctcacacccagaaaagttgacagttggaattgtgacactcatccatggatggagtccacaggtgtgatggttaatactgaatgtcaacttgattggattgaaggatacaaagtatttatcctgggaattgagaaaataacaaattatcccataacatttactaattatctgaagatagatcctcagaaaatatattactgggttaaatgatgtctatgtaaactgttcacagttacagccagatgactttccaaaagggctgtagcaggtccatcggcgctggcattctctgatgcacctgctgctctgtatctaagctctcctgcatattacattcttttaatttttgttgtcagtttgtgtctatatggcaaataaaatctcattgtccctttcactttcagtttttaaactgacacgtttgagtcacctttcagttgtttaagacctattaagattttctcttttttgagtcatctgctcagatctttggccctgtgatgggcattctcccaccctggagttttccagcatttgcccctttgccagttctgggattgttgtagttatttctccagactccctttaatattaaagaaaaaaaagcaattggccgggcgcggtggctcacgcctataatcccagcactttgggaggctaaggtgggcggatcatgaagtcaagagatcgagaccatcctggccaacattgtgaaaccctgtctctactaaaaacacaaaacgtagctgggcatggcggcgctcgcctgtagtcccagctattgtggagcttgaggcaggagaatcacttgaagccgggaggcagagactgcggtgagccaagatcatgccactgcactccggcctggtgacacggtgagactccatctcaaaaaaaaaaaaaaggcggggggatttgcatggggagaatcctatggaggaccaataaaatctcagagaagtgagctcgacataaagcaaagaaaatagactcgctttcagaatttttgacatttttgcctttttagtaaattatcaacactttggaaattatgttttatttcaatatttttcttttctttgcaaaataggtatacacccaaactcacacaaacacaattacttactccgtaactcctttacttctaagatttatccttagaggaatatatttgtatattttatccttgtaaaacaagactatcagtctgcatatattttgcaagtcagaaaggtgacatgtgcaaaaaaaaaagtggaataaaattttgtaaatactcattcaatattcagaaatacatggctttaaattgtacttttatataatcttcattattaccattataatggccctgtagttacaaaaagaataaaaatattaccaatagaaacaatattctttaaactgtttgatgtttaaagttattgaaaaaagggatccctaaaaatgttattcaactatgttaaccaatagtgtattgttatcatctgttacctacaagcttcagttaggttggataggttaacactggtaaaaaaataatactttgttcaatgcacaatagtagaaacaaaaacaattatgcttaattaaaacaaattaagttcacacagaatctaaatttttttttaaatccactgtatcttattattttaataagcaattggaaaaacaacttgaattgaagatctaaaatgtttctcccttactataatgcatggaatcttactctaaaaacctaccccatgtatcacatgctgttgttaatcaaccacaaagcacttccccacttagaatctcttgatatgtcttacatttcagtgtctatgaaaaactatgtgaatgatgcttgtctaatagagatgtgcctcttataggtctgatgaagcaaaaactaaccatgtgcttttgtatacacactaagaatgaaggcataacaagtgatctaagagttgaattgcagccgggcatggtggctcacgcctgtaatcccagtattttgggaggctgaggcaggtggatcatgaggtcaggagttcaagaccagccttgccaagatggtgaaaccccatctctactaaaaactgcaaaaattagccaggcgcagtggaaggtgcctttaatcccagctacttgagaagctgaggcaggtgaatcgcctgaagctgggctgcagaggttgcagtgagccaagatcgtgccactgcactccagcctgggtgacagagtgaggctctgtctcaaaaaaataaaaaagagttgaattgcatcaatgtttgcttttcaagaattttaattttttaatgcaaaaagtatgctttgaatgtaattataactctccagaagaaaaatcaatctcctccttttaaatgtacatacaaataaattaattttttggtaattctttatagaaacaaagtcttgctgtgttacccaggctggtctcaatctcgtgggctcaagtgtttttttcaccctagcctcccaaagtgctgggattacagacatgagccatggcacctggccttcagcaattttctaagcttcccaatgacacagtatattgtaaaaatatacacggtagcctgggtgcggtggctcatgcctgtaatcccagcattttgggagcccaaggcaggcagatcacaaggtcaagagatcgagaccatcctggccaacatggtgaaaccacgtctctattagaaatacaaaaataagctgggtgtggtggtatgtgcctgtaatcccagctactcagaaggctgaggcaggtgaatcactcgaacctgggaggttgcagtgagccgagatcatgccactgcactccagcctggcaacagagtgatactccttttaaaatatatatatatacacatatataatatatacatgtgtacatatatataatatatacatgtgtacatatataatatatacatgtgtacatatatacaatatatacatgtgtacatatataatatatgtatatataatatatacatgtgtacatatatataatatatgtacatatattatatatgcaataaatacattaagctacattaccataagaaatttggtcatgtagtgtttaaattacctatctcaatttatattaaaaaaactgaaaatcggggccaggtgcagtggctcacgcctgtaatcccagcacttagggaggtcgaggtggattgatcacctaaggtcaggagttcaagaacagcctgaccatcatggtgaaacctcatctctactaaaaatacaaacttagctgggcgtggtggcaggtgcctataatgccagctacttgggaggctgaggcaggagaatcgcttgaacccgggaggcaggggttgtagtgagccaagatcatgccattgcactccaggctgggcaacaagagctaaactccatctcaaaaacaaaacaaaacaaaaaaaaacctgaaaattaaaaaaaaaaaatagattttcttacatttacagaggtacttagtgttctgataaagttactgagtacaaatatctctagaaacacatctgaaaccatcacagaatagaaagtcataaagtagaaaactcacatctttatctggtgttcttgcgattttgaaaccaaatttcaatatcactactgctttcacacatttcagcaatgatgtagaaaggatttaaaatagtttcatacagagtttctctaaaagacaaatagtctcatgtcccccaatagcaatggaagacctgtcagattattcaacctcttataaaccataagatggacttcagctctaagtataagcttgaaggaagattaaattaaagtagaattcttgggggatttaagaccatgggacagaagctgccccactgtttgggtatgagaaaagaaatcaggcattttagaaactatttctattgcagcagaccttcctaaaccacattttatggtctggctttcttcttcacctttggacctcagctgtgtcatcttctttcactcccgcctacctaggtgctggctatggtctcttgtctttctaaattccaagattctttcctttgcttcagagagttgatcaggcccagattagacacagcaagatctgtcttattagaaaaaggaaacatgagttttgctggattctccaattaccagactagtacttagtactgtgcttactaaagaaaaagaatattacagataatgtaaagttaatatcaaaataccttttcttcgacagaatctttagaatatttagaaagtattttaaatttgtgggtccttagctcactacccagtagtactactgaatcaaaagctggtggtgaaaattggattttaaaatatgagcaacattttatgctactaaatttctataattaccactaaactagagtgaagaatgtcaatcattcaagaaaaaaaggttaatctcaaaataaaacatattgggcggggcacggtggctcatgcctgtaatcccagcactttgggaggccaaggtgggtagatcatgaggtcaagggttcaagaccagccaagaccactgcactacttttttttttttttttgagacagttttgctcttgttgcccagattgaagtgcagtgccatgattttggctcactgcaacctctgcctcccaggttcaagcgattctcctgtcttagcctcctgagtagctgggattataggcatgtcccaccacgcctcgctaattttgtatttttagtagagatggggtttcaccatgttggtcaggctggtctcaaactcctgacgtcaggtgaaccacctgccacggcctcccaaagtgctgggattacaagcatgcaccaccgcgcccagccaaaaaaattctttttttatactaacaaattccccaaattttctagacagcagggatctaaaactattcattgaaagcaaaattatgtttaggaatatggagcatatttttatgtttgttggcttcttgtaagttttcttttgagaagtatcagtttatgtcttttgctcatctttgtggggttatttattcttctttaattaatttttttataggttctggaaattagacttgtcaaatgcatagtttgcaaacatttactctcattctgtaggttgtctgtttactctgttgatagtttcttttgctgtgcagaagctctttagaatagttaggaagttgggaaattgtcactttttgtttttcttgcttacttttggagacttagtcaaaaattctttgccaaggccaatgtcaaaaaagatatttagtaggtttttttgtaggatttttatagtttgatgtcttaaatttaaatccttaattcatcttgtgttaatttttgtatatggcaaattgtaggggttcagtattatctagtatttttttccgcatacggttagctggttatcccagcaccatttattaaatagacagtcttatttccattgcttatttttgtcaatgttgtcaaaaattatatggctgtaggtgtgtagctttatttctgagttttgtattctgttccactggtctctgtctgcttttataccagtaatatgcttctttggttcctgtagccatatagtatagtttaaatttgggtagagtgctgtctctggctttgctctttttgcttaagattgttttgggtatttatgctctttattgttttatataaattttagaatagttttttttttaattctctgaaaagttttattggcagtttgatagagatagcattgaatctgtagattaatttggccaatggggtcattttaatattgattcttttaatccatgtgaatataatgtacttccatttgtttatgtcatctatgatttctcttagcagtattttgtagttctctttgtgataattgttcacctcctgggttatatgcattcttaggtatttttttgtggcaagttaaatgggattgagttcttgatttggccctcagcttcaataatattggtgaataaaaatgacttttgcgtattgacttggtattctgaaacactactgaacttgctgataagttccaggagctctttagtaaagttattaggtgtttttaggtatcaaattagataatccatagaaagagatagtttgactttttttcccgtaatttggatgccttttatttcttgttcttgactgattgttctgacgagaactattattaatattttgtcattaaaagtgaataaaaattctatcactctcctgcttctacttcccttaactcttacattacagccaaaagaaatctttacatttctcattttattacaataaaaatatgtattttaccagaaaaataaaacaagaatatggttaaaaaaaacccaaaacatatatcaaatttaaaattttctacaataaaataaaatcgattgaaacatgtaaaataaaagaaagcagccaggtgcagtgactcacgcctgtaatcccagcactttaggaggccaaggtgggtggatcacgagatcaagagttcgagaccagcctggccaacatagggaaaccctgtctctactaaaaatacaaaaattagccaggcctggtggcacatgcctttaatcccagcaactcaggaggctgaggcaggagactcacttgaacccgggaggcagaggttgcagtgaggcgagatcatgcctccgcactccagcctcagtgaaagagtgagaccctgtctccaaaaaaaacaaaaacaaaaacaaacaaaacaaacaaaaaaacaaagtgcaggtgagtgcttcgaactgaacaccttagaagccctagtccattgtggatgcactgaagccaagattgtcaccaaaactcagttctctgttctccagagtccaggatctgtaaaactctgcatttaaaaaagctctcaatgtttttccaggggagactgtgttcatctatatcctatctcttctcaccttgattcaaatcctacctgatctagcggtgctgtttctggttttgagcttagttttctgtaattctctttcttatttggattgtggtctggtcctagtcagaaaggaagtttaggtgactcaaatctctctagatccagagtcccatagtctattcctgacttacatttgttgttcattttcttaactaaggctgttcagcaagcatcaagagttaatgagaagaatacggttccaagggatcattactacaattctcaaagccatctcagggatataagccatttctcattccctagctcaaaataaaaccctaccaaagacacacagcttactatccctcattccaccactctttctgatcttaatatgaacagcccaaggccttatctggcatttgagtgcattacctactggaatgggaagagagcaccttgtcttttttcaaatagtttctcctcctcatctaagcttctatctgtaaaaaagatttgttgaaaatggagctggcaagtggggccttggatgaagaggtagagaagatcttggtcttcagtttcccattccatgttgaaactcaaatgaaatgtcctctctcttacacatccagactcagaatgcagggtgttatgctggacttgccttttataagcccctcagctgggtacggctcactcttatgacaagaaatttatttcctggagacattatggccttcataaggaatgtttcaggttgtgatttactgggtaccttagacacacataaggggagattttttcagggtcctgtcatagcatcaaaaaccaaaataacaaaaccagccaggtgaggtggctcacacctgtaaccaaagcacttagggaggccaaggtgggtggatcacctgaggtcaggagttcgagaccagcctggccaacatggcgaaaccccatctctactaaacatacaaaaattagccaggtgtggtggcgagtgactgtaatctcagctactttggaggctgaggcaggagaatcgcatgaacccaggaggtggaggttgcagtgagccgagatcatgccattgcactgaagcctgggtgacaagagtgaaactctgcctcaaaagaaaaaaaaaaaaccagtaggcatgaaaattgaaagtcaagagactcatccccttttgatttctagccctcttttcacccagaactattaaaaaccttggccagattttaaaatgctaaattaaacagaccatatattaacaggtatatttaaattgtacacataaagaaaattacataaaggccaggcacggtggctcacacctgtaatctcagcactttatgaggttgaggcgggcggatcacttgaggccagaagttcaaggccagcctggccaacgtagtgaaaccccggctttactaaaaatacaaaaatgagctggatgtgggtgacatgtgcctgtaatcccagctactcgggaggcagaggtgagagaatcggttgaacccaggaggcagaggttgcagtgagccaagattgcaccattgcactccagcctgggtgacagagtgagactctgtctcaaaaaaaaaaaaaaaaaaagaaaaaaaaagaaaaaagaaaattacatataccattaaaattgtatacctatatgtcacaatttttcaaatgcttggaaatgacatatcaaattatagttgattgcatttgataaatatacaataaaataaaatgcagaacaaccaaactccaaatagaatatgcctttgtctcttgaatgttgaagagatacttaaatcaaatgtgatcacattgaattgatcagataggagccagtgctaactcaatcaaccactgattcctaaggcagcaaagagcccagctggagaagcaagcttctcctctacctcaccctccctcagtcatcctgggtgctacattgtcttctgtagaatttgctcagcattcactatctgagctgacaaatttggctagattattatcacaaccctaacacattttggttctttgttcttgtttctttgtttaaaataggttgtggatataactattacatcatgaaacttttttttttttttgagatggtgtctagctctgttagccagactggagtgcagtggcgtggtctgaactcactggaacctccacctcccaggttcaagcgattctcttgcctcagcctcctgagtagctgggattacaggcgcctgccaccacacccagctaattttttgtatttttagtatagatggggtttcgccatgttggccaggctggtctcaaacttctgacctcatgatccgcccgccttggcctcccaaagcactgggattacaggcatgagccaccacacgtagcctacatcatgaatctttagaaacccagtatggtacttgtctgggtctagtcctaaaaataataaacagatccaaaaaactgttgcaacattaacctttgaaagctgcctgtgatgatactgactcactgacctcctttctcctcaatccacagagaaagtgcaagaaccaccaggtcttagggcacatggccaggaccaggaggtacccagtgaagtgctctaatgtggtcctgtcccacagcccctgaaccaaataaggacaagcagaacctgaaaccaaggaaggcttgggaactgcagactccaggactctttactaagactaacaggaggaatgaaggcaaagatcagatacctgcagggttgaaaccgtacccagactttggaattttagtgtctccttctttactctgtgtccacagccctctttaagagtggagagagaaacataatagaaatacatgaagagtctgggtgcggtggctcacgcctgtaatcccagcactttgggaggccgaggggggcagatcatgatgtcaggaaatcgagaccatcctgactaacacggtgaaaccccatctctactgaaaaatacaaaaaaaaaaattagccaggcgtgcctatagttccagctgctcaggaggctgaggcaggagaatcgcttgaacctgggaggtggaggttgcagtgagctgagatcgtgccactacactccaacctggtgacagagcgagactctgtttcaaaaaaaaaaaatacatgaagagcccagcatactcctgagttcctctctcaggagctcattctattcctggaggatcattgtgagcaggtgtatgaggataccttgaaactgcatgtggcaggcacaattgcagtagattacaaatgaaagcccatcttgattggacatgaagaaaccatgcaaggatgcttggagttgggggctggatttgacatgaaggcagaagataccttcacaaagttcagaagaccttcattgctttcctcacagcaaaatatgagcgaggacagtgcccctgctgttccttccctgggtggtgacagaaagttgagacacatacaaacacttaacatagtttactcagcaagcaagaaaatcttggaaggaagattctactgcagaatttgtgcagcagatatgaactgaagcatcagcaaaactgaaaagtaatgagagaatctggtggctctgaggtgtttttttccctttgtttcctgcttagttgctctttgaggatcccctgacttgttttactcctgtgccctttatgaatgagtgatgatcatcttaaaaatcaggatgttcggccaggtgcgatggctcacgcctgtaatcccagcactttgggaggccgaggcgggtggatcacctgaggtcaggagttcgagcccagcctcaccaacatggtgaaactccatctgtactgaaaatacaaaaattagcctggcttggtggtgtgtgcctgtagtgcccactactcaggagcctgaggcaggataattgcttgaacccaggaggcagaggttgcagtgagccaggattgcaccactgcactccagcctgggtaacagagagagactctgtctccaaaaaaaaaaaaaagaaatcaggatggtaaaaaatatttttcatgtatgtgtaccttcctttttactcttcttcctcttcttcttcttcctcttcttcttcttcttctccttcttcttctccttctcctcctcctttttctcctcctcctcctccttctcctcctcctcctcctttttctcctcctcctcctcctcctcctcttctccttctcctgctgctgctgcttttttggattcttctgcttctgttttctttttctctttgctattatgtacatgcccaccaagaacatgctaggtatggggatttctgcacagatgttcaagtgttttatgagatgccttccaggaggtagaatcctttatgtaagatcatgtgtctttccacgcttgatacatattttaaaattatctttcaaaaggtaattggccatttatactccttacaagcatgcacaaaacagcaggtttcctctgataacatagagaccgtattaaggaacatttaaatttccaaactgatggtcacacaaactcatatattttgtaattattttttaaccaccattaaagttggatgcctctttatgtagacaatgacaatttttacttcttttactgtgaaatgttattataggtcccgtgtctttttgtaattaagtttgtaattttgctcttaatttttaggggtggctaacaccttttatttgaacaccatatctcccacatcattctagcagggtagtgcctatccacaaatcctgagaatagatttgttctgaatctgctgtcatgagttagcaagaagtcaataaacccagagtgtcatccatccgcctagcagggcctcttatcaagtcatgaactggtttctctcttaattcatgaacagctgaagaactgaaggtggatttattaattggccccatgctttacctaaccacttgggccaggactcaaccctctttgccaagctgactatcaacaggcttgaagtttgctctcataatgtaccctagtgtgccaccaagacacctgtcctggccactacaacttgtcttatggttgtcttggtataaatgcaaactcagattgcttgctgtcgagcatatatgtggccaggacagcaaatctagcattcaggaatgaggcaagaggccttcccagactcccaaatgaacttttcagaattttccaaaaatgctgagactcagtactttccagaccccactctccaaaagaatcatagatgggatctgggaaccattcagacactcaagcctcctctgcagtgaaaatgaacttggacctaaagaggcaaccctttgtccacaggtcaccaagaatgctgagcatcgatctcctccctccccatgggagaccttacctcagttccatcaaagcccatattgtttcccaacctccacaatccagacatgttctagagtaaactctcagaattgtcttgagatgggacaagggctggtggagctccaggttcagaatggcggcatcattttccctcctgagaagtttgcacctgctgatcagagcccttacctcttagggggcttagcccatgtccaaggaagtaccccctaactggatctcccagtctcttcctcctctaaggagagtgcccatgagaccctctatgctagggaatacatgacctccattcttacgtaacttggttgactgataaacggataccctgagaaacaagaagatgcagggaacatcttggttctggttaatctgtgctccttagctgaggtgcctgtgcaaatgctggaacccaaaataatattgggtggtagacacacagacactgcctaataaaattatgtaagtttatgtttaacataaatagaatttataatgttatataaaaatgttgctacttaattttataagaaaattcagtcagatttttataaaggcattacaatctaattttaatgagaagctatgaaaattatgtacacttggtgtgtaaatgactgagttttgggtaattctgcaaaggccaactatgaatgtgagtcattgttaaccaaatgctcttacagataccatattgcacacctgttttaatttgttcttttacctgaggtcaatttttcataattttaattatcaaattttatacactttagataaaagaaacctttgcagttaccatgtactctgttggtctgtagtttgttagaaatacaaaatttcagacaagatacaggtatgttgtatcaaaacctggattttatgtatttccaggtgattcacatgcacattaatggttgttatgttggagtaattctattcttaaaaggggaaataattatatgggtgtactggtttgtctaaaaggtataactaagatggtacgtttcagtgcctatacatcctatctcacacacacacacacaaaaactgagaaaaaagtggaaatggggaatagattgaagtagagattaaacaaaaatgacacataggccaggtgcagtggctcatgcctgtaatcccagcactttgggaggccgaggcaggcagataacctgaggtcaggagttctagaccagcctgaccaacatggtgaaatcctatctttactaaaaatataaaaattaggccaggcgtggtggctcacacctgtaatcctagcactttgggaggctgaggcgggcagatcatgaggtcaggagatcgagaccatcctggctaacatggtgaaaccctgtctctactaaaaatacaaaaaattagccgggtatggtggcatgcacctatagtctcagctactcaggaggctaaggcagcagaattgcttgaacctgggagatggaggttgcagtaagccgagatcatggcactgcactccagcctgggtgacagtgagactctgtctcaaagaaacaaaacaaaacaagacaaagattaaccaggcatgatggcacgctcctgtaatgccagctactcaggaggctgagacaggagaattgcttgaacccaggaggcggaggttacagtgagccaagattgtgccattgcactccagcctggttgacagtgagactctgtttcaaaaaaaaaaaaaaaagacacacaattagcagatattgaagttgagcatcagtctattatgctattatggttattgtgtaaatgtttaaagtattctgaataaaacacatgtatgaagagataaagttgatctacaacattagctcttaagattgtggttcctggctaagcacaatggctcacacctttaatcccaacactttgggaggtcaaggtgagcagatcacttgaggtcaggagctcgaaaccagcctgggcaacttggtgaaaccctgtctctactaaaaacacaaaaattagccaggcatggtggttcacacttgtaatcccagctactcggaaggctgaagcatgagaattgcttgaacctagaaggtggaggtttcagtgagccaagatcatgccactgcactccaacctgggcaacagagcaagactctataaaaaaaaaattttagggagtggacaagatggccaaatagaaacagctttagtctgcagctgccaacaagagaccaatgcagaaggcaggtgatttctgcatttccaactgaggtacccagttcatctcattgtgactgcttaggcagtgggtacaacccacagagagtgagcagaagcagggtggggcgtcactttgcctgggaagtgcaagggactgggatccttcctccctacccacagctaagggaagccatgaggaactgtgctgcccagctgggttactatgcttttcccacagtttttgcaatctgcagatcaggagatttcctcctatgcctgcacaactagggccctgggtttcaagcacaaaactgggtggctgtttgggcagacactgagctagctgcaggagtttttttttcataccccagaggcacctggaaccccagcgagacagaaccgttcactcaccctggaaagggggttgaagcccgggagccaagtggtctctctcagcaggtctcactcccacagagctaagcaagctgagaaccactggcttgaaattctcagtgctagcacagcagtatgaagttgacctgggcgattgagcttgggaagggcatccacccccattactgaggctttagtaggagattttcccctgaaattgctaaggaggctgaaaggtctgggctggatgtggcaaaatagctgtggtcagactgcttctctaaattcctcctcactgggcagggcatctccgaaggaaaggtaacagccccagtcaggggcttacagacaaaacccccatctccctgggaaagagcacctgggggaaggggcagctgtgggcacagcttcagctgatttaattgttcctgcctgctggctccgaagagagcagctgatcctgacaagagggattctgccagcacagcacaccagctctgctaagggacagactgcctcctcaagtgagtccttgacccctgagcctcctgactgagagaaatctcctaacagggttcaacagagacctcataaaggagagctctagctggcatcaggccagtgcccctctgggatgaagcttccagaggaaggagcaggcagcagtctttgctgttttgcagcctccactggtgatacccaggtgaacagggtctgaagtggacctccagcaaactgcagcagacctgcagaagaggggcatgactgttagaagaaaagctaacaaacagaaagccacaacatcaacaaaaacataaaggacccccacacaaaaaccccatccaaacctcatcagcctcaaagatcaaaggtagataaatccatgaagatgagtaaaaaccagtataaaaacactaaaaattccaaaaaccagaatgcctcttctccacaactcctctccagcaagggcacaaaagtggctggagaatcagactgatgaattgacagaagtaggcttcagaaggtggataataacaaactcctctgagctaacagagtatattctaacccaatgcaaggaagttaagaaccttgataaaaggttacaggaactgctaactagaataaacagtttagagaggaacttaaatggccagatggggctgaaaaacacagcacaaacacaagaacttcatgaagcatacacaagtgtcaatagctgaatcaatcaaacagaagaaaggatatcaaagattgaagatcaacttactgaactaaggcatgaagacaagcttagagaaaaaagaatgaaaaggaatgaacaaaccctccaggaaatatagcactacatgaaaagaccaaacctgtgattggttggtgtatctgaaagtggcagggagaatggaaccaagttggaaaacacatttcaggatattacccaggagaacttccccaacctagcaagacagaccaacattcaaattgaggaaatacagagaacattgctaagatactcctcaagaagagcaaccccaagacacataatcgtcagattctccaaggttgaaatgaaggacaaaatgttaagggcagccagacagaaaggtcaggttaaatacaaaggtaagcccatcagactaacagcagatttctctgtgaaaatcctacaagccagaagagagtacgggccaatattcaacattcttgaagaaaagaattttcaacccagaatttcatatccagccaaagtaagcttcataagcgaatgagaaagaaaatcctttacagacaagcaaatgctgagggatttcatcaccaccatgcctgccttacaagagctcctgaaggaagcactaaatatggaaaggaaaaactggtaccagccactgtaaaaacacaccaaaatataaagaccaatgacactatgaagaaactgcatcaactaacatgaaaaataaccagctagcatcatgatgacaggatcaaattcacacataacaatattaaccttaaatttaaatgggctaaatgccccaatttaaagacatagactggctaactggataaagagtcaagacctatcagtgtgctgtattcaggagacctatctcacatgcaaagacacatataggctcaaaataaaggtatgcaggaatatttaccaaacaaatgaaaagaaaaaaaaaagctggggttgcaatcctagtctctgataaaatagactttaaaccaaaaaagatcaaaaaataaaaagaagggcattacataatggtaaagggatcaatgcaacaagaagaattaactatcctaaacatataagcacccaatacacgagtgcccagattcataaaacaagttcttagagatctacaaagagacttagactcccacacaataatagtgggagactttaacacccctctgttaatattagacagatcaaggagacagaaaattaataaggatattcaggacttgaactcagctctggaccaagcagacctaatggacatctacagtactctccacaccaaatcaacagaatataaattcttctcagtgccacacagcacgtattctaaaattgaccacataattggaagtaaaacgttcctcagcaaatgcaaaagaatgaaaatcataccaaacagtctctcagaccacaggacaatcaaattagaactcaggattaagaaacgcattcaaaacctcacaactacatggaaattgaacaacctgctcctgaatgactactgggtaaataacgaaatgaaggcagaagtaaataagttctttgaaaccaatgagaacaaagacacagtgtatcagaatctctgggaccagaatctaacacagctaaagcagtgttaagaggtaaatttatagcactaaatacccacaacagaaagctggaaagatctaaaatcaacaccctaaaatcacaattaaaagaactagagaagcaagagcaaacaaattcaaaagcgaacagaatacaagaaataactaataccagagcagaactgaaggagatagagacacaaaaaaccttcaaataatcaattaatctaggaactggttttttgaaaagattaacaaaatagatagactactagctagactagtatagaagaaaagagacaagaatcaaataggcacaataaaaaatgataaaggggctattaccactgatcccacagaaatacaaactactataagagaatactataaacatctctatgcaaataaacttgaaaatttagaagaaatgaataaattcctggacacatacaccctcccaagactaaaccaggaagaagatgaatccctgaataaaccaatagcaagttctgaaactgaggcagtaattaacaggctaccaaccaaaaaatgcccaggcccagatggattcacagctgaattctaccagaggtacaaagaggagctagtaccattccttctgaaatgatttcaaacaatagcaaaagagggactcctccctaactcattttatgaggctagcatcatcctgataccaaaacctggcagagacacaataaaaaaaaaaatttcaggccaatatccctgatgaacatcaatgcgaaaatcctcaataaaatactggcaaaccaaatccagcagcacatcaaaaagcttatccaccatgatcaggtgggcttcatccctgagatgcaaggctggttcaacatacacaaatcaaccaacataatccatcacataaacagaaccaatgacaaaaaccacatgattatctcaatagatggagaaagggcctttgataaacttcaacatcccttcatgctaaaaactcttaaaaaactaggtatggatggaacacacctcaaaataataagagctattgatgacaaacccatagccaatatcatactgaatgaacaatagctggaagctttccctttgaaaaccggcacaagacaaggatgccctctctcaccactcctactcaacatcatattgtaagttctggccagggcaatcaggcaagagaaaggaataatgtgtattcaaataggaagacaggaagtcaaattgtctctgtttgcaaatgacatgattgtatatttagaaaaccccatcatctcagcccaaaaactccttaagctgataagcaactttagtaaagtctcaggatacaaaatcaatgtgcaaaaatcacaagcataggcctggcatggtggctcgtgcctgtaatcccagcactttgggaggctgaggtgggcagatcatggggtcaagagatcgagaccatcctggccaacatggtgaaatgccgtctctactaaaaatacaaaaattagccaggcatgatggtgtgtgcctgtaatcccagctactcatgaggctgaggcaggagaatcgcttgaacccaggaggcggaggttgcagtgagccaaggttgcaccgctggactccagcctgggtgacagagcaagactccgtctcaaaaacaaaaagaaacaaaaaaaacacacaagcattcctaaacaacaacaatagacaagcggagagccaaatcatgactgaaatctcattcacaattgctacaaagagaataaaatatctaggaaaacaacttacaaggcatttgaaggacctcttcaaggagaactacagaccactgctcaaggaaatgagaggacacaaacaaatggaaaaacattacatactcatggataggaagaatcaatatcatgaaaatggccatattgaccaaagtaatttacagattcaatgctattcccatcaagctaccagtgactttctttgcagagttagaaaaaactactttaaattttgtatagaaccaaaaaagagcccgtatagccaagacaatcctcaagatgaattgaagacttaaatgtaaaaccccaaatcataaaaatcctaaaagaaaacctaggcaataccattcaggacataggcatgggtaaagacttcatgactaaaacactgaaagcgattgcaacaaaagctaaaattgacaaatgggatctaattaaactaaagagcttctgcatagcaaaagaaattaccatcggagtgaaaaggcaacctatagaatgggagaaaagttttgcaagctacccatctgacagaggtctaatatccaaaatctacaaggaacttaaacaaatcatttatgtggccaacaaacatatgaaaaaaagctcatcaggcccagagcagtggctcacgcccgtaatcccagcactttgggagaccaaggtgggtagatcacgaggtcaggagttcaataccagcctagtcaagatggtgaaaccctgtctctactaaaaaatataaaaattagccaggcacagtggcaggcacctgtaatcccagctacttgggaggctgaggcaggagaattgcttgaacccgggaggtggagtttgcagccagctgagattgcaccactgcactctagcctgggcgacagagaaggactctaactcaaaaaaaaagaaaaaaagaaaaaaagctcatcatcactagtcattagagaatgcaaatcaaaaccacaatgagataccatctcacaccagttagaatggagatcattagcaagtcaggaaacaacagatgctggaggggatgtggagaaatagaaatccttttacactgttggtgggagaataaattagttcagccattgtggaagacagtgtggcaattcctcaaggatctagaactagaaataccatctgacccagcaatctcattactgggtatatacccaaaggattataaatcattccactataaagacacatgcacacatatgtttactgtggcactgttcacaatagcaaagactcggaaccaactcaaatgcccatcaatgatagactggataaagaaaatgtggcacatatacaccatggaataccatgcagccataaaaaatgagttcatgtcctttgcagggacatggatgaagctggaagacatcattgtcagcaaactaacacagaaacagaaaaccaaacactgcatgttctcactcataagtgggagctgaacaatgagaacacatagacacagggaggggaacatcacacattgaggcctgtctgagggggcaaggggagggagagcattaggacaaatacctaatgcatgtggggcttaaaacccagatgaccagttgataggtgcagcaaactaccgtgtcacatgtatacctatgtaacaaacctgcatgttctgcacatgtatcccagagcttaaagtaaaattttaaaaataataaaaattaaattaacaaaaaaagattgtgattacctttagggaggagaaggaaaagaggctgaaaatggtggttgggggcataaacaaggctaattctattctatggttaaacaaatgtgtttgccttacaatgatttattaagctttatattaatgctttgtgcatgtatttctgtatgtatgctatacattaataaaaatttaaatattacatatttaatcctaacaatatttcagaattacagtaatgtttggtattattttgttttaaagtggggcattttcatgcaggtgttctgagatggatattaatattccaaggtatatctttatgttctgtctcttgggagacccataaggttttccaatttctacctcaattaagtagcactgttttaatttggaggatgcaattttttacagcaaagtcttctccccacgatagtactcaccaaggccaggccgcctagcacagtgccctgcacgcagtgtgcacccagtctgtacagaactggtttgaatcaggaacaaaacaagtagcagaggtcagttctacaaatgatagaaagtaggtacacaatgaagactgaaaggctacactcaacagcaaacacttttgcatttatttggaaaatattttaaactagctcaccaaatgatgttcatgtcaagcagtgatttgggagtttggctgtgactgtaacctcctggagagctttaaatcacattgtctcctgggtctcactccaggattttggctaattgtgccattgcaacttgagtttggggactttaaacatcccaccttcaggttgctctaatatccaggcaggggtaagaagcatttattcagggtgaagaatgcattgcttgtgtgtgatttttatgtgtgcttcaggctttgccccatagctgctcctaaatttgtgggcttagaaaacatctttgcccttcaaagtatacacagctgtttggctaaattgcagcaggagaaaatatcagcagctctatctatgtcacttacctttcgagtaagaggttgtttcaggcacagtaatttgatttcttctgtgttgaaaattataaatagcctagaactaccagaaagagatacaaagattttgcagatgtgtggagtgcattataggtgttttcaaatttctcttataatgagaaataaaaaacataatattaggccttaatttactaaactcagtgttcagccattttctcaaatggtttatagtttttccaagagacttcagcagcattctctagagggaatgaattcccccaagagtgctaactggatgggatgagaataaaacataatcttgcttctatttcagaagtgtccctctacagagccttttttttttttttaggcggagtctctctctgttgcccaggctggagtgcagtggcatgatctcggctcactgcaatgtccgcctcccgggttcacgccattctcctgtctcagcctcccgaggagctgggactacaggcacccgccaccaggcccggctaattttttgtgtttttagtagagacggggtttcaccgtgttagccaggacggtctcgatctcctgaccttgtgatccacccacctcggcctcccaaagtgctgggattacaggcgtgagccacgcgcccagcctccagagtcttgatggactagaaaacgtggctgagtagtgtggtctgtggaagtgcatgagctctggactcagatagagttaatccttaatcccagcccagctgcttagtagctgtgggacagttaaataaaccttatctgcaaataaaagcataataggccgggcgcagtggcttacgcctgtaatcccagcactttgggaggcagaagcgggcaaatcacgaggtcaggagatcgagaccatcctggctaacagggtgaaaccccatctctactaaaaaaatacaaaaaaattagccgggcgtggtagcgggcacctttagtcccagctattgcggagcctgaggcaggagaatggcatgaacgcgggaggtggagcttgcagtgagccgagatcgcgccactgcactccagcctgagcgacagtgagactccgtctccaaaaaaaaaaaaaaaaaaaaaaagcataataaaattgattgaaaaaaacaattatttttattcattctcatatccatgcccttagcatatgattttataatagttcccatcaagagacaggatctgttttctaaatcttggatctttctggccttatttgcacaggccaaaactgaaatgacagcatgtcagttttgagcctaggctcaaaacgtcttaaatgtttctaaaatgggtcttaaaagctcatttttgcttgctgaaaaataaaagtatcacaaggagaaaaattgaagtgccccagttgacaggtagctcactctcagaagcagaaccacccaatctgccagcagctgaccactcatgcctgaagcccagcctaaatttctaaccagttcaatgatgagctagtaagttttaggatagtttgttatgcagttataccttactaacataaacattcattatagacagggtatcaggattccaaaaagattcattgcaaataacctgcaaatggtctgcaccttataagtactgattttcttttccatttatttaaagttagatttctgttaggtggtattgaattatacagaagagcaagtagatgtatataattggtgcttaaactcacacagtgccccataccacaggagaaaaacatacagctacagccagacaattaggtccgaggccaaatagcaaaataaggagttgacctttgtattaatttattttcacactgctataaagacatacctgaggccaggcacggtggctcatgcctgtaatcccagcactttgggaggctgaggcaggtggatcacaaggtcaggagatcgagactgtcctggctaacacggtgaaaccccgtctctactaaaaacacaaaaaattagctggttgtagtggcaggcacctgtaatcccagttactcgggaggctgaggcagaagaattgcttgaacatgggaggcggaggttgcagtgagcacagatcgcgtcactgcactccagcctgggcgacaagagtgagactctgtcaaaaaaaaccccaaaaaacaaacaaacaaacaaaaaaactacctgaaacagagtagtttatgaagagaagagatttaattgactcaaaattctgcatggctggggaggcctcaggaaacgtacaatcgtggcagaaggcaaaagggaagaaaggcatgtcttcaacaggtggcaggagagagtgaaagagagagaaagcactatagacttatcaaacaaccagatctcctgagaactctatcagagagcagcaagaggaagtctgcccccacgactcaatcacctcccacaaggcccctccccgacatgtggggattacaactcaagatgagatttgggttgggacaaagagccaaaccatatcagcctttaatctattccctccacatctgaactttggaggtcaacactgtgaagagatgtgaagacatggggtttcctccttctgaggccctatcatccattgtttactgtctgatatttggaagagaaatcccctccaaacagcaactgggacacagtggtctacatgtggacacttcctgcttgcagctgctgctctgtctaagggcactgtgcctcccacccttgggcctgaacagagaagtttataggcagaggctgttctctcacttccagcagaaaaaggatattcaggtcctttacctctttgaggtcagagagtcacagtcttcagagatgcacttcaatgtgccagctacttgccatttgaggctactgggtacctggaatgtggctgatttaaaatgagatgtgctgcagatatgaaatagagtcagttaagaaaatttagaaccaaaaatcactctattaataattacatactgggctaggcacggtggctcacgcctgtaatcccagcactttgggaggccgaggcgggtggatcataaggtcaggatatcgagaccatcctgccaacatggtgaaatgcgtctctactaaaaatacaaaaaattagttgggcgtggtggtgggtgcctgtagtcccagctactcgggaggctgagggagaagaatggcgtgaacccaggaggcggagcttgccatgagccaagattgtgccactgcactccagcctgggcgacagagtgagactccatctcaaaataataataataattattattatcattattatatattgggctgggtgaggttgctcacacctgtaatcccagcactttgagaggccgagatgggtggatcactgaggccaggagttcaagaccagcctggccaacatggcaaaaccctgtctctactaaaaatacaaaattagctgggtgtggtggcccacatctgtaatcccagctacttgggaggctgaggcagaagaagtgattgaacccaggaggcagaggttgcagtgagctgagatcacgccattgcactctagcctgggcaacaagagcaaaactctgtctcaaaaaaaagatgatgataataataattattatatgttgatcacacatttattcccagtgttccattattggaacactaagcatatgggagttatttatatctcactgctcaaggtcattgccaacgtctgactgcaaaaattttaaaaattgcaacctcaggcataaatgggttaaaataataatattttggatgtactgggttaaaaaataatttcacttgtttctttttattatgtttaatgtggctactaaaatatttaaaattcacacacggctgacattttatgttttagaggattgcttttcttttaaaatctcaggttgcctactcagaagatcaggggccggaagtgttatgaaatattaaatattaaaataattgccattatagtgtttccatttgtaaacaacatatatgtgtgtgtataaaatttataagtggacctaaccttatacacaagattaaaaaattacccccaggcagagctaagcccagctcagaggtaaagcccttgctggagatgactggagccaagagtctgtcactcttgcctcattcagtgcactgtctggtagcatcttctgtcactcaaggcccgagggcgcggggccgggagctctatccaatcagggtgctgggatggaaactgtccaatcagattcacagccagagaggaaggggcggctcccggtatctggcggggcctttgtctttcgctccaggtagagcttggggttagtacatcactggcctgcgtgctccgctccaggaggtctcggtgattctgccacagcctcatcctccgtcgccctgtgacctactggtattggaacattcatagctaagactccaggacacccacaaagccgagaaatgctgagtttgcgggtcagggcgtccggagactggggaggcctcatcggagtcggccggaaatggcggtggcgggaccgagtctgtgagcctgagcccccctcagctcagccctcagtctcctctggtgcagggtacccaggcgtcctgtaccgtttcagcacagcggctttggccccagcctgtagccctctttgcgcagctctgcgcccgcatcttccccagcttgtgaggtgatgaggagaggttcaccagggaaagacgccgacttggtgtgcagggcttctgcgtggaaggagctctggtctgtggggtcaccagtccctactttaacctattcagacataaacggaggcaccattaaaacattaaagaatttatatgagcaaacagtgatgaaccagtgggacagccccagacatggtttgtcgtttgggggctaccagcgggtcttgaagaaaaggctttaaggtttgtgaagaggcaaagcaaactaaataattgattgggtacagttatgtagtcgtttcatttagagtgtccaggagaaaattttctggttatgtaatcagattaattggagatttatggttggttaagcctgaattttgttttctcctaaggtagtaacttacgagatacgcatttgagttagatcgttttgttgctgttacacaggaacctagatccctagagccacttcagtctacctgctatttaattattttaactttaatcagaagcactgtttttttcctacattttccaaatgtgtggcaagcagagtcttaaatctgttctgccagcctaacttggcttgcagtaaaatcttaaatttccagtttcttttttttttttttttttgtttgtgacggagtctcactctattggccaggctgcaacctccgtctcccaggctcaaggaattctcctgcctcagcctcccaagtagccgggattaccggcatgtgccaccacacccggctaatttttgtatttttagtagagacggggtttcaccgtgttagccaggctgctctccaactcctgacctcaggtgatccgcccgccttggcctcccaaagtgctgggattacaggcgtgagccactgcaccaggactgaaatttccagtttcttttcaacattcaccaaagccaactactcccatccaattcacaacattatcaactatttttgttttttattgtatgtttctatttgtaaatatttcaccggaggaaagcagaaaataatcccattacactccactgtcaaaaatttttctgctttttcttcttttatcttccctaggcacaaatgccttatcaggatatctttaaattcaagtttccctttggaaacttgatgggacagtgtgtcctcagccacactgcttttttttaagtcttgagttttagagctctcttgggataacccaagatacacacaacagccataccttttggaaggtttggtgaatatcagccccttggtcatctccttccagaggacacactgatgtatggaaatggagcttctcaggagagcagctgaatgtcctgaggctgagagaaatatcctggtttacccttcccataaaaagaacctttggggatcttaagattttctttccccagccccagttcttcctggtcagccaattggatggttgtatttaggggaaaagacaaaaataatgcctgtcttctgaattatctcatatttgtgaaggggggagaactgttttaaaagacaaaaaaaacaaacaaacaacaacaacaaaaaaaactcaccctaaggaggcatgcaagaacttgcaaagcaaaaaaaaaaaaaaaaaaaaacaccagggacacactgtagggcactgtgcagtgtcttctgggagggagagctttgagcactttagtgagtagggtaagggtggcagaatgtaccaacttataggattgcctgatttgacacttgagtcagatatgtgtctcttctggccgggcacggtggctcatgcctgtaatcccagcagctggggaggccaaggtgggtggatcatgaggccaggagatcgagaccatcctggcgaacgtggtgaaaccccatctctactaagaatacaaaaaaaagtagctgggcatggtggcacgtgcctgtagtcccagctacttgggaggctgaggcaggagaattgcttgaaccagggagtaggaggttgcagtgagctgagcttgcaccagtgcactccagcctgggccacaaagcgagactccatctcaagaataagggaagagaccagccctcatattgtcttatgcccaatttctgcctccaaagaaagaagaactaaaaactaaaaggcagaaatgaaatccacaggcagacagcccagtgccacaccctgagcctggtagttaaagattgacccctgacctaatcggttatgttatctatagattacagacattgtatggaaaagtactgtgaaaatccctgtcctgttctgttccattctaattactagtgcatgcagcccccagtcatgtaccccctgctttctcaattgatcacaaccctctcatgcggacccccttagagttgcaagcccttaagagggacaggaattgctcactcggggagctcagtttttggagacgtgaatctgccagtgctcccagctgaataaagcccttccttaacttggtgtctgagggatttttgtctgcagctagtcctgctacatttcttggttccctgactgggaatgaggtgattaatggatggatggttgatgcacctccttaggcagctgaggcttgccctgtggagcatccctgcgggggactctggccagcttgagcaacatggatcctgagagcgctcccagataggcatttgccctggtggaatgccttgttagagcggtgcacagcaggcccctgcggaggatcaacgcagtggctgaacaccaggaaggaactggcacttggagtccagacatctgaaacttggtaagactggtctttggaacttgcccactccatttgagtggaagcatggcctgatcacccacgacgtgcctgtaccggcactttggtttttgtttttgacttgacttggattgctcgatactttggttttggttttgacctggcttggatttcttgatactctgatttttgttttggttctgatttggtgtaaactgtgaaagtgtgtgtgtgccctttttacccgttctttgttttgtggtgtgcgtgtggtgtgagcgtggtgttttgtcttgaggaagcatgggtcaagcacaaagtaagcccaccccaccaggaactatgttgaaaatttcaagatttaagggagactatggagtactatgacaccaggaaaacttaaaactttgtgtaagatagactgaacagcattagaggtgggttggccaccagaaggaagcctggacaggtcccttgtttcaaaggtatggcacaaggtaacctgtaatccagggcacactgaccagttcctgtatatagacacttggttacagctggttttagactgccccccacagtggttgagagaacagcagcataagcggctggcagaggcaaggaaagaccagcagagagagagaggaagagacagacaaagagggagtcaagaagagagagagagagagacagaaagtgaaagagagaaagaaagagggaaatatacaagtagttaagaaaaaaaaagtgtaccctattcttttaaaagccagcgtaaatttaaaacctgtaattgataattggaggtcttttccgtgaccctacaacactccaatacaaccttgttgtaagtgtaagcaagggtgaagcccaaaagcactgaggccactgacaacctgtagccttcgtatcaaaaattcttaactgagtaatctgtggatggcccaaatgcattcaatctgtagcagcaactgctttgttaacagaagaaagtagaaaaataacttttagaggaaacctcattgtgagcacacctcaccagttcagaaatatcctaagggaaaaaaaaaaaaagatgatttaacattagccactgaaaattcccttaacctagcaggtttcctaacagggggtctaaatcttaattaccatacaaaggtctgaccagacctaggaggaactccctttaggatgggatgatagaaggaaaaaaaagaagccatctataccaattctaagttaatttggactaaacaaggtcttattaatagcaaaggataattgaaatccaaaacttacaaggttttcaacaaaagtaaagtttgctaaaagttaacagtgtaacatgtattatagtaacttctaatcttgtggccttagacagtctagtccacagacataaaggaagttcactttggaaaagaatggttatcatctttgggaaaaaaaggggaaagaaggtgagggagcagaatttatgtaaaaagaatgttatatggtaaattcttgtcctgaaataaattaactggttgtttaaagaaagaaatgtttgtaataagtcagaaagttgaggcctgtagaagaattgtctgtgaaagtcgtgaaagaaaaaaagttataaaaaaaaatttatgcaagaaatgttgtataatttaaaagtaactaggcctcctgaatgtaaaactattgaaaaaaacagtttatatgcaaggtgtataaacaaagtaaaatataactttggtaaaaggattataaggaggcataagaatgtaaatttttacctacattaaaaggttaaaaaaaattgttttgaaggtttaagcaagttttaaaacattaattttaaagaaaattctgtgtgtaaacatattagctaaagttaaaggggtatcatccagttgttctgtgaactggacgttaaagtaaaaacacaatgagtttttcttaaagcgctaacatgctcttttacaaagattataaaaggttaaaaacagtctataaaaatcttaccttggccgggcgcggtggctcacgcctgtaatcccagcactttgggaggccgaggcgggcggatcacgaggtcaggagatcgagaccatcccggctaaaacggtgaaaccccgtctctactaaaaatacaaaaaattagccgggcgtagttgcgggcgcctgtagtcccagctacttgggaggctgaggcaggagaatggcgtgaacccgggaggcggagcttgcagtgagccgagatcccgccactgcactccagcctgggcgacagagcgagactccgtctcaaaaaaaaaaaaaaaaaaaaaaaaatcttaccttatgatccaacattaaaaattgaataaatgtgtctataaagttttattaaaactaagtttaacattaatagcacactaatataaaggtgaaatttagcttatctggtataaaaatcatacaggaagcattgtcaaatataaaatggtatttggcttctttgatctaaaaactaataaaaaatacatgctaaaggaaatttctcagtagaaaggcaccaaggactacaaagtccactgctgatgtctccacatttaaaacaaaaggtcagtttcttagaaattatatacttggtttatcttccgctttcctttccatcaaaactaaaagtcttttagcacatgtaccacccctagaatttccagtaaaccagcaccagcctgaagatcacgttctcatcaaagggtgaaaagaaaggaaacttgagccagcctaggaaggaccctaccttgtgctgctaaccactgagactgctgttcatgcagcgaaaaaaggatggactcatcacaactgagtcaagaaagcgccaccccctccagagtcatgggccatagtccaagaggaaaaccctaccaaactaaagctaagaaaaatttaactctctcatctattctattactctttcttctttcctcgctctattgctgaccatctagttattaatgtagccaagtcaatttcacctcaaactattgcatttaatgcatgccttgttataccctgtggggacttgccaagtcaaagacttgtacttcagaaagctctgtacttcagaaaagtacctctgtccctcctgactctcctcagactgggcattagtaaattaggaccgtttaatccggggaaatttcgataaagcctccagtgtcaaccaggagccttgctccccaatgtagagcttttatgccatagttggtccaacattctgtggaccactaaagagcaaggatggactgccccaactggtttttgtaattccctaaaatcatacattaattttactagaggatcatagaagttaaagacttaaaacaaactttggcaaacaggatacgaagatgcaaattcctggttggaatggatcaaatattccatccacacgttaaacaaaagcaattgttatgcttgggcacatggcaggccagaggcccagattgtcccctttccactaaggtggtcctcctgtccaccaggcatgggctgcatggtagctcttttccaggattctacagcctggagtaataagttgtaccaagctctctctgtgatatcccaaagtccagcaccctgtgagtcagcccctgagggccatccagcttctgtctcccaacactaagttcacttcatgtctctcatgacagggaggaaacttagcattccttggagacctgaagggatgcagtgagcttaagaattttcaagagcttatcaatcagtcagcccttgttcatccctgagcagatgtgtggtggtattgtggtggacctttactgggcactgtgccgaataactggagtggcacttgtactttagtccaattggctatccctttcaccctggcatttcatcaaccagagggaggaaaaataagacatcgtaaagtaagagaagccccttatgggtctttcgactctcacgtctatttagacacaattggagtcccacggggaataccagatcaatttaaagcttgaaatcaaatagctgcaggatttgagtcaatattttggtgggtgacagttaataaaaatgtagattggataaactacatctattacaaccaacagcaacgagcttttcgtgagttaaaagaaaagctcatggcggccccagccctggggctacctgacctcacaatagttttacattcaggaggactaattacttttaaatttatacaacaatttcttgcataaattctttttttataattttttttttttttacacaatatgtgtcagaaaaaaaaatgatagttaatagttttaacccagactgtgggacactggccaaagctggtggcctatctctctaaacaattagacagggtttctaagtgttggccctcatgtttgagggccttggcagcaacagccctgctagcacaacaagcagataagctaactcttgggcaaaacctgaatataaaggcccccccatgctgtggtaaatttgatgaataccaaaggacatcattggctaacaaatgctagattaacaagtaccaaatcttgctatgtgaaaatccccccataaccattgaagtttgcaacaccctaaaccctgccaccttgctcccggtatcagagagcccagttaaaacataactgtcttaatccttttaaatggatcaaacccctcggaggatcattgttgtcactggcattattaatattggtatgtttatgttgtctacttttagtctgcacatgtctccaaggagtctgaggacaagtgcaaagtcaacaacaagcaatgatggtggtggtgatcctagtcaataaaaagggggaagatgtgggtggcaagccacccaggtgccaaagcaagagactgagggcacaagctattccagtataataaagaaaatatatagtataagaatagttctactagaaatagattatggatatgattatatatgaatgtcattaatcattagtttgtagcattattctttattctaatattataataatctttgttctacaattataacctaggaaaaaccaggccctacagagataggaggtgaagggacatggtgagaagtgaccagaagtcaagaatgttagccctctgttacgcccagacagggccactagtgggctccctggtctagcagtaatgccagcacccattacctagcagaccttggtctagcagtagcatcagtgcctagggaaggcacccattacttagcagaccaggaaagggagtctccctttccccgggggagttagagaagactctgctccaccacctcttgtggaaggcctgacatcagtcaggcccgcctgcagccatctggaggcctaaccgtctccctgtgatgctgtgcttcaatagtcacgctcctggtccactttcatgttccactctgtatacctggctctgccttctagatagcagtagcagaattagtgaaagtactaaaagtctttgaaatgcataaaagaaatagtggtgtaatctgtcctctctctctctccacctcggctgccaaacagggaagggccccctgtccagtggacacgtgactcgtgtgaccttacctatcattggagatggctcacactccttaccctgcccccttgtcttgtatccaacaaataacagcatggccaggcattcagggccactaccagtctccacaccttggtggtagtggtcctccgggcccagctgtcttttcttctatctctgtcttgtgtctttatttctatgatctctcatctccgcacatgaggagaaaaaacccacagaccctgtagggctgggccctacataactgtgtagaggtattagactcagtttattctagtgggcccaacctccgagaccatcttgagtatcaggagactgtgagctatacttggatgggagcagctttgccaacctctgcaaagtgactctgaaaaagatggcaagccctgctccagtcacacctggaagctgactggttcccgcatcaccaaagcatgaggaaattaatcacaggactcatttccctgaaaatttggacttgtacagtaaggacttcaactgaccttcctcagactgaggactgttcccaatatatacatcaagtcactgaggtaggacaaaagtttgctacagtcctattattttatggttattttaagtgtaccaggactctaaaaggaacttgtttgtataatgctattctatacaaggtatgtagcccacgaaatgaccagcctgatgtgtgctataacccatcttttttcctactgcccataaaaacaggcgaacttctaggtttcctggtctatgcttcccgagaaaagagaagcatagctataggcgactgaaaagatgacaagtggccccctgaaagaatcatacagtactatgggcctgccacttaggcacaagacagctcatggggataccgaatccccatttatatgctcaactgaatcatacgattacaagctgtcttagaaataatcactaataaaactggcagagcttcaactgttttagcccagcaagaaacccagatgagaaatgctatctataaatatagactagccctagactacttgctaacagctaaaggaggggtctgtgggaaatttaaccttactaattgctgtctacacatagatgaccaagggcaagtagttgaagacatagttagagacatgacaaaactggcacatgtgcctgcgcaagtgtggcatggatttaatcctggggccatgtttgaaaaatggttcccagcactaggaggatttaaaactcttatagtaggagttataatagtaataaaaacatgcttactgctcccttgtttgctatgtacttcttcaaatgataaaaagcttcatcgctaccttagttcaccaaaatgcttcagcacaagtgtactatatgaatcactatcgatctgtcttacaggaagacatgagtagtgaggataaaggtgagaacttccactaatgagagaggttctcaaacggggggaaaaagggaggagaccacccctcatattgtcttatgcctagtttctgcctccaaagaaagaagaagtgaaaactgaaaggcagaaatggaatccacaggcagatagcccagcatcatgccctgggcctgctagttaaaaatccacccctgacctaactgcttgtgttatctatagatttcagacattgtatggaaaagcatcatgaaaatccctatcctgttctgttctgttctgactagtggtacatgcagcccccagtcacataccctctgcttgctcaatcaatcatgaccttttcaggcggaccccgttatagttgtaagcccttgaaagggacaggaattgctcactcagggagctcagtttttggagatgtgagtcttccaatgctgccagctgaataaagccctttccttctgcaactcggtgtctgaggggttcttgtctgtgtctcatcctgctacaacagaggtgggcagatcacgaggtcaggagttccagaccagcctgaccaacatggtgaaaccccgtctctagtaaaaatacaaaaattagccaggcgtggtggtgcaagcctttaatcccagctactcagggggctgaggcaggagaatcacttgaacccgggaggcagaggttgtagtgagccaagattgcgccattgcactctagcctggtcgacagagcaagactccatctcaaaaaaattaaaaataggctgggttggtggctcatgcctgtaatcccagcactctgggaggctgaggtggatggatcacctgaggtcgggagttcgagactagcctgaccaacgtgaagaaaccctatctctactaaaaatacaaaattagccaggtgtggtggagcatgcctgtaatcccagctactcaggaggctgaggcaggagaatcgcttgaacccgggaggcagaggttgtggtgagccaagattgtgccattgcactccagcctgggcaacaagagtgaaactctatctcaaaaaataataataaataaaaataataaaaaataataatgaataagtaaataaaataaaaataagggataaatatgcaaggaaatagcataaagaaaaaacaatcagaacctcaggaaatattggacacacttataaaaatgcaaaatgctctggaaagtctcagcaatagaattgaacaagtagaagaaagaaattcagagatcaaagacaagatcttcaaattaacacaatccagcaaagacaaaaaaaaatgaacaaaaccttaaagaagcctgaataattggtttttctgaaaaagaagaaaaatctaaaagtttggaaaacatatttggggaaataattgaagaaaacttacctggttttgccagaggcctagacattcaaatacaaaaagcacaaagaatacctgagaaattcatcacaaaaagatcatcacctaatcacattgtcatcaggttatctaacgttaagatgaaggaaagaatcatatcatatatacatatatatatatacacatcatatatatatatcatcatatacacacacacacacacacacacacacacacacaatggaatactactcagccataaaaaggaatgaattaacatttgcagtgacctggataacattggagactattattctaagtgaagtcactcaggaatggaaaatcaaacattgaatgtcctcactgagatgtgggagctaagctatgaggacacaaaggcataagaatgatgcaatggactttggggatgttggggaaagagtaggagggggatgagggatagagactaccaatatggtgcagtgtatactgctctactgctcaggtgatgggtgcaacaaaatctcacaaatcaccactaaagaacatactaatgtaaccaaataccacctgtagcccagtaacttatggggaaaaaaaagagacttaaaaaaatatatatatatacaaaaattagccaggcatagtggtgcatgcctgtagtcccagctacttgggaggctgaggggagaatcactttaacctgggaggcggaggttgcattgagccaaaattgtgccattgcactccagcctgagccacagagtgagactctgtctcaaaaaatatatataaaaaataaaactagtaatccaggcaaaacaaaaatgaattatacattatgaaaatactctgccacatttttatactaaatcagccagtactgaaattttttagatgtgccatttgagtaaactgtgtgttccaagtcagattacctatgataacctctcagttatcagtgctatgaacctaaattgaagaaacaaacttgatatttaagaggacataaatttaatgttaagtgtgaactcatagagaacctagacagcagtgacttttttcattcctgagttcttaaagcttcctttatcaaaagcactgcattttatcactcgccacagaagagataaaaaatagtctaagttggcggggcacagtggctcatgcctgtaatcccagcactttcagaggccgaggtgggcagatcacctgaggtcaggagttcaagaccagcctgaccaacacggagaaactctgtctctactaaaaatacaaaattagctgggtgtggtggtgcactcctgtaatcccagctacttgggcggctgaggcaggagaatcacttgaacctgggaggcagaggttgcagcgagctgagatggtgccattgcagtccagcctgggcaataagagtgaaactccatctcaaaaaaatacataataataatctaagttaaatataaattaaatgtgtgtgtgtgtgtgtgtgtgtgtgtgtgtgtgtgtgtgtggtgactgtcctaactaccaaaataggttaggaccgtttttttcctctcaaacatataatcctgagaagacaatccaaacttcatgtacactttgggagaccaaggcgggtggatcacaaggtcaggagattgagaccatcctggcgaacacggtgaaaccccgtctcttctaaaaatacaaaaaaaaaaaaaaaaaattagccgggcatggtggcaggcacctgtagtcccagttactcgggaggctgaggcaggagaatggcatgaactcgggggatggagcttgcagtgagccgagatcgcgccactgcactccagcctgggtgacagagcgagactccatctcaaaaaaaaaaaaaaaaaaagcttcatgtacatttctgctacctgaggatctatttaaacatttgtaaagaaatcttattcaattgtcatgtttaatgcatattttcttgtagaataaaaattttctcatgggaaaagtctgatgttataacagtagcttaaaggataataaaaaatatgttttgctcaggagacatttctgaaaaaggctccaataatatacttatttcggccgggagcagtggctcatgcctgtaataccagcactttgggaggccaagaagggtggatcacgaggtcaggagttcaagaccagcctggccatgatggtgaaaccctgtctttactaaaaatacaaaaattagccaggcgtggtggtgggcgcctgtaatcccagctactcggtaggctgaggcagagaatcacttgaacccaggaggcaaaggctgcagtgagctgagatcgtgccactgcactccagcctgggtgacagagtacgactctgtctcaggaaaaaaaaaaaaaaaaatccgatttcactggagaagttataaactgttaaataagctattccagaaacaatagtattgagaaaatccaactaaattgacaggattgcttttgtaattgcagattgatgacaatcagattcactgagagtgaaaaactgttttgactattataaacttgtaattggatggcttatgtacctgataatagaacctcatgtgtgttctgttactgaagtttaatatgactaaatgcagcaaggctttaatgcgttatggcaaagcatattttcaccaggtaaacaaccttttatggtctattgactgaggacagaaaaaccctttatagtctagaacccagagattgagtctgcttgccatctacactgaagcaagacttcaggaccttgaaccttaggttgataatctcacaactgagaaggggccctccaaattcttgcaattgtatgcccattggagtttttttttttttttttttttttttggagacggagtcttgctctgttgcctaggctggagggcagtggtgccatctcagctcactgcaagctccgcctcctgggttcatgccattctcctgcctcagcctccctagtagctgggactacaggtgcccaccaccacgcccagctaattgttttgtatttttagtagagacggggtttcaccgtgttagccaggatggtctcaatctcctgacctggtgatcctcccacctaggcctcccaaagtgctgggattacaggcatgagccaccacaaccagccgcagatattaaggtaaagttaaacagggaagtttctcctaaaaagcaaaggcagctttgatgtagatcgctttcttcacaagatgaaaaatcaagacatctctactatcatgacactcttagattacggtttttttcttatggctctgcaaacaacagaaattaaaaagggcctcttgtgtgcactcatggggtacacttttatatgtagaagattttgcagccaacattatatatgaacaaacttatgccttcataagtaaaagatgaaggtccaatgaggatgagaaattttaatgggacatctgttgcctcataatatcagaaacagaatattggttcactgcagttaacctaattcataagttaaagagaacttattcagaatagattatagagtattgccaggaggccattactcttcaatggctatcatttgttaggtatttttgttccccatggtttagagtaaatgaggcaatggttagaaatttattccccctactagggctctatagcatattctattgtaaaggctatggttacacaatagactttaatttttctttttaaagttgtgcaaaataatagaatttctctagattacttactggatgaacagagaagtatctgtgcagttgctaaaacttgtagttgtacatagaaaaatatatcgggtattacagagattcagttgtaggagattaataaataggctgcttggttgaaatgaggagaccatttatttacctaattatttgatctatttaatgttagttggtgggctcatgagaccctggctaaaaagcatacttgaggccaggcatggtggatcacacctgtaatcctagcactttgggaggccgaggcgggcagatcacgaggtcaagagttcgagaccatcctggccaacatggtgaaaccccgtttctactaaaaatacaaaaattagctggacatggtggttcatgcctatagtctcagctactcgggaggccgaggcaggagaatcacttgaacctgggaggcgaggcagaggttacagtgagccgagctcacgccactgcactctagcctggcgaaagagcaagactccatctcaaaaaaaaaaaaaaagcatacttgaaactcttgttattatctttcttatagtcgaaatagtagtctccctactgcattgtattctctcaaaagttataaatgtttgtatgcagttatctctagaatgtcaaatgatctctctttaacagcaatcacaaaaactcaaatgcatatgtgaccatgaggacaccataacctatgaatgacctgataaggacaaaaactaaaggtaatggaaactgagagtggcattaagacaaagttttggtcacactcttacctatgtgagaacttaaccaaaaggggggaattttataaacaacattattgaaggccatcattctggattgagcttgtgcattacgcccaaagagaccaaaccaaatcaaatggagtcactcatgctaaatgtgacataatcaaactgaaaatgtaaggaaataggtagatcctaaaacaggccaggtttggttattcttttgaaaacagcagatttcaacacaaggaggtcacctgtactgtaacccttaaaaaaaaataataacctgaagtccttgtttccactttacaaaagctacagttctgctatttcacaatgggatttgagaataaataagtagatttttgatggtgacagaataatatcaatgtctaaagctttgttctagctctcaaaattgagaagatgatcaaaagggagaaattgttaaattaattatgcctaaagctgctcccttttctgtttaactttggtcactaggtttttttttaaacattgtaaactgaaacctaactggatatataaatagactgtaatccattattgtaccaaccactgtgtttttgccaataaaaggacatcaagtgttcaaattatgtttcaataaggcaaatcccaacctgtaatcaatctggctgtttctgtacctcacttctattttctgtatgtcactttgctttttccatccacaaacctgttttcataatgtggctttgccagagtctctctgagcctactctggatccacaggctgcccaatttgcaaatcattctatgctctattaaactctgttgaatttaatttctctaaaattttaaagtttttctcttttaaaagttttcaaatattttcttctctctctctctcttttttttttcttgagatggagtttcactcttgttggccaggctggagtgcagtggtgcgatcttggctcactgaaacctcagcctcccaggttcaagcgattctcctgcttcagcctcccacgtagctgggattacagacatgtgccatcacgcccggctaattttgtatttttagtggagacagggtttcctcatggtggtcaggctgatctcgaactcctgacctcaggtgatccacccacctcagcctcccaaagtgctgggattaggcatgagccaccgcacacagcctagttttcaaaaaaaatttttttttgagacagagtttcgcgctgtcacccaggctggagtgcagtggcatgatctcagctcactgcaagctctgccttccaggttcacgccattctcctgcctcagcctcccgagtagctgggactacaggcgcccgccaccatgcccagctaattttttgtatttttagtagagacggggtttcaccgtgttagccagatggtctcgatctcctgacctcgtgatccgcctgcctcagcctcccagtgttgggattacaggcgtgagccacagtgccagctcaaatattttcaatgataaaaataaataatgtgctgttgggctttgattttctaaactcatccctcagctatttcctcaaattattctgtcttcgaaatgcttctccaatatttttttttttttgagacagagtctcattttaccacccagtgtggatggcagtggtgcagccaatcatggcttactgcagccttgaccttccagactcaagcaatcctcctgcctctgccacctaagtattgggactataggcatgtaccaccatggttggctaattttttcatttttttaatggaaacaaaatcttattatgttgctcaggctgcactggaacgcctgagctcacataattctcccatcttagcctcccaaagtgctaggattacaggtctgagccaccgtgtttgcaaaatggtagcaatttttcatcccccttgtatccatgcccaatgccagatgcttttacagttgtttccatcaagattcagaatctgttttccaaaccctagatcaggctggccttatttgctcagggcagtagaaacctgtgaacatggcaatgagctagtttgggacctaggctcaaatggtcttgagtgcttctgtttttcttttagaatgttgacatcaccttggaaaaaagcccatgttagccagctggaaaataaggtatcatggggaggagaagcaaggtgtccctattgacaaccccagaagcagaacatcacccccagaagcacagctgcctagtcaacaagcagctgacgacatatgactgaaggagctcagctgaaaccagaagaatggccccactgagcccaacctaaatggctgaccatctcgattatgaactaataagttttggatgatttgttatgctgcaatagctaactaatacatgcacccagtgcagataggatgccaggattcaatgacaggttgattactagttatgttctaacagtgggcaccctataggtactgattttttcccctgatttaaagttgggtgacttgtaagagaatgttgagtaatgcagaaatacaggtagacatgtatgcatgtgattggtgcttatacccacacagtcccacacaccacaggagaaaacaggtaactacagcctgactagtagggccaaggccaatagcaaaataagttttgcctttaatctgttttctccatatctaaacatttgaggtcaagagtgtggacagatctgaagacacagagttttattatcctgtggccccaacattctttcttcactgtctgatctctggaagaaaagtgggcaacaggtggccagcagtggtctacctgtggttattttactcctgctgccatctgctctttttatggccactatctgttccacccttagaactgaagaaagatattggtagggagagactctgccttcacttctggcagaaaagggatgttcagttcattcacccccctgacatcagagctgaacttcaatgtggcagctattggccacgtgtgcctcctgagtgactggaatgtggctggtctgaactgcgatgtgctagaaaggtaaaatacagagttagtttcaaagatttagtttcaaatgtttatatacattattaataattacacattcctcacacattaaaatgataatattatggacatattgggttaaattgttacaatcaattcaacctgttccttgtttctttttcaagtttgtctactagaaaatttaagattcacatgtggctcacattttatttcagaagattaccatctttttaaaatctgaggctgcctcctttagccgggaaggtcataaaatctgaaattttaaaataattattgttacattcttttcatttttgaatagccactatatatatataaatataaatatatataaaaatatataaaaataaaaatataaatatatataaaaacataaatatatataaatataaatatgtataatatataaatatataaaaatatataaaaatataaatataaaaaatatatataaatataaatatataaatataaatataaatatatataaatatatacatataaatatataaatataaatatataaatatataaatataaatatatataaatatataaatatatatatataaatatataaatatataaatatatatatataaatatataaatatttatatataaatatatataaatatataaatatatataaatatataaatatatataaatatatataaatatataaatatatataagtatataaatataaatatatataaatatataaatatatatataaatatatataaatatataaatatatataattatataaatataaatatatataaatatatataaatgtatataaatacataaataaatatataaatatatataaatatatatataaataaatatatacaaatatatataaataaatatatataaatatatataaataaatatatataaatatatataaataaatatataaatatataaatatataaataaatacatatataaatatataaaatatatataaataaatatataaaaatatatataaataaatatatataaataaatatatatatatatatatatatatatattttagacagagttgtgctcttgttgcccaggctggagtgcaatggcacaatctcggctcaccgcaacctccgcctcccaggttcaagcggttctcctgcctcagcctcccgagtacctgggataacacacatgggccaccacaacccgctaattttatattttttataaagactgggtttctccatgttggtcaggctggtctctaactcccgacctcaggtcatctgcccgcttcagccttccaaaatgttgggattacgggcgtgagccaccgtgaccggccccatatattatttataaatgcatatgaccttacacacaaggttaaatgcaaataacctctggggtgggcctggctcagctcagggaggaagccctgtcagagaaggatgcagcccaagctgtcactcttctttcagccccgcatctcatcacatcttccgtcaatcatggcctgagggggcggggatttaaatgttatccaatcagagacgctaggcagggaaccgtccaatcaggcacgcaggtgaagcggacagggcggcttccgggtttggcggggcctttgtccctcgctgtggcctgagctccaggtctcgtcttcagcgctctgtgtcctctgctcctagaggtccaggctctgtggccctgtgacccgcaggtattgggagatctacagctaagacgccaggaacccctggaagcctagaaatggtgagagtgccgggtccgacatccccagagaggggaggggctggttgtaatgggtgggaagtggctgtggcgggactcaggcctcccggcagtcagctgcacaatctgcgccccgagttcttgcccagctgggcctcagtccccatcagccttaagatggcggctgcgctgacaggcgggccccagcacgtcccgtctcttccttgcgcagtgactgtgccctggcctggagccctctctgggcagctctgcatccgcagcgccgcgtctctcccagactgtgcagggaccacgggaggatcgtcacgggagaatcgtcacgggagaatcctgacttggggtgcgagttcatgaatgggaagaactttggtcctgggttcctagttcctcttttctcctattaaaaatgtacagaccgggaggggtggctcacgtctgtaatcccagtactttgggaggccgaggcgggcgcatcactaagtcaggagagttcaagaccagcctggccagcatagtgaaaccccgtctttactaaaaatacaaaaatttgccgggcatggtggtacacgcctgtagtcccagctacttgggagactgaggcaggagaatcacttgaacctgggaggtggagattgcagtgagccgagatagcgccactgcactacagcctgtgtaacagagcaagactccgtctcggaaaaaaaaaatgtacagaagtcaccacaaaaatattaaagaaattaatcaaagagtgattaaaaaactgttgagcacccagctgtggtttgtaatttgttgttcatggcggggcttgaaggaaagacttttataaggtgcatgatgaagaaagccaaattcagtaattggttaggtaccgttatgtagtttcttagtttgtacaataaaggtgaaaattttctggttgtgtaatcagaccttaattggcagtatacagttgattaagcctgaattttgtgtctttcaatgtagtaattttcaaaacgatgcgcctgagttagattttttttttttttttttttttttttttttgagatggagtctcgctcttgtcgcccaggctggagtgcagtggcacaatctcggctcactacaacttctgccgctgcctgtgttcaagcttctcctgcctcagccttttgagtagctggaattacaagcgcctgccaccctgcccagctaatttttgtacttttagtagagacggggtttcaccatgttggcctggctggcctcgaactcttgacctcaggtgatccgcctgccttggcctcccaaaatgctgggattacaggcgtgagctatcacgcccagccacgttagatctttttaaaagtaggaacccagggtctagagacacctcagtctaattgcctgccactcaattattttcacactccacggggaactgattttctgctgcatttttcacctgtgtcccaagcagggtcttaagtctaacccccgtcccccatttctccagcctcactctggcttgcagtaagatactaaatttccagttctttctggcgttcccaaatgccaacttttcctacctaattcacattatcacctatttgtcctttagtgtacattttttacaccgtattttaattagttattttctgacaaagtattaaatggtgcttttaataagatttgttatctgtttgtaaatatttcccatgtgaagaaagcaaagaataatcccctgacactgtgttgtaaaaactctctgtgcttcttctccttgtatcttctctgggcacagagatcttgtctcaggatgtttttgggtcagggttttcctttggaaactttatggggtgttgtgtcctcagtcacccttcagtttttttctggtcctgggtttcagtattgtctggggataaaccaagatatccgccatggttatgtcagttagagtgtctagtggatatcagcttctgggttattttctcccataggagaacctgaagtctggagtgtatcctctcaaggaagcaagtggatgccctggggctgacaggaatcttctggtgtactctttttatgaaaaggtaaccccttgagatgttaaaattgtcttcacccaacccagctttcatttcttggagacacattgctggtcaaccaatcagactgtggcattgaggggaaaacaaataatttttgcctctggattgtctaagggggcagaaaaatagtgaaataactatagtgaaagtaaaatagtggaaaaaagtggaacatttgtgacagaaaaaatagtatcccaaaagacaaaaagaaaaagaaaaacactgaccccagtgagatggcgtaagaacttgcaaagttaaatgcccgtgggacagtcactggggcatagtgtggtatctcctgagtgggtggttcttgagcacataagtgagcaggagtgggtggaagactgtttgaagtgattgaatggcctgacttgaaacatgagtcagacacatctgttttttcatcagcactgccactccctgggtttgtcaccttgaaaagatttgttcatttattttaacctcagttttttagctgtaaattctattagtagggcttgaaaggtaggaaaatatttaccaaaggcataaaagtggtgggtttaagaaaaaaaatagtatctaataatatattccattcattaaaaattctctattccctttttacccccagggtgagtttaggaattttctcaggtgtgttttttatggctgggtgatttcaaacagaattctaaggctcagcttttagaatgctaccaaggaaatgagtagggaaaatctctgttccatttttttgtagaaaataaatacatttctacaagaaaatgtggtagataattggtgagttacatacattcatgaaaacatgagtttctctctctgcagggtaaatttgtgacagtaaacatctctgttcaaatcctgttatcttgatttctgagtttcatgctaaattttatgagatgaaacttggtaccacctagaagttttcccatatgactaactgtttactaaatgattcttaatggaattcataaaataatgcatacattatgtgaaagaaatagatattttgctttttttattgaggtataaattgcaaacaccttaaaatttccttcccttgtatgaacactgtgactaattttgctagatttttcaaacacatagtttcaaaaaccaagtgagtaactctaacatagaaattaaagcttgagcccagtgactcagagctaaggctaatattgagcctgcaaaaggagtttattacaggcccagttagttttttttctggggagcctcccctgcagatgtcctagcctgctcactctagctgtggaagaagcttttctgctgagagaagctacagagtcctggaaaggtggggacccacaggcagatgcagttaaggttaagatggtaggagattgagagggtcttactgatgataaagttgttaatgtttgaaggcagtttctagactttgtaatacctaacaaagttagatttatgttaaaaatttgaattccaaaggactattgcaacaggaggaaataccaactgtaagaaccttaaggattgcaaagtttaggcagaaaagggctttctttcatggggaggagcaaacaaaattagaagttggagacggccggatgctgtggctcacacctgtaatctcagcactttgggaggccgaggcaggcggatcatgaggtcaggagatggagaccatcctggctaacatggtgaaaccccgtctctactaaaaatacaaaaaaatcagccgggcgtggtcacgggcgcctgtagtcccagctactcgggaggctgaggcaggagaatggcgtaaacccaggaggtggagctggcagtgagcctagatcgcgccactgcactccagcctgggtgacagggccagattccatcttaaaaaaaaaaaaaagaagttggaggtgactgacaaatgaagggtgaaataatcagattttagatcagagaatgttttaccctgaagtcagcatgttcttaggagggacataaaatggagttgtatattggctcagattgagggtagctccaagttcaggagcctgtgaaaaattttatttagaccactgaagacaaattcagctgatttttttaaatgagaaaaagaaaatgtgcagagttcttatcggaaaggggtcacaatccacaccccaagagagggttcttggatttcgctcaagaaagaattcagggtgagtctacagagtaaagtaaaagcaagtttattaggaaacagaaggaataaaagaatggcttactctataggcagagcagccctgagggctgctggttgcccatttttatggttatttcttgattatatgctaaacaaggggtggattatttttgcctcccaattagacaatataaagtcattttctgatgtttccatgatgtctccatggcattttgtaaactgtcatggcactggtgggagtgtagcagtgaggaccaccaaaggtcactctcatcccatcttggttttggtgagttttatccaccttctttactgcaacctgttttatcacccagatctttataacctgtatcttgtgctgaactcttgtctcatcctgtgacttagaatgcctaaccatctgggagtgcagccccataggtctcagcctcattttacccagcccctattcgaaatggatttgccctgattcaatacacctctgacatttctccttttttttttatctgagacggagtctcactctgttgcccaggctggagtgcaacggcatcatctcggctcactgcaacctccacctaccaggttcaagtatttctcctgcctcagcctccccagtagctgggattacaggcgcctaccaccatgcctggctaatttttgtacttttttttttttttttttcagtccaatcagtttactctgctttctccatctcctcctcccattagtcagccattggaactgggaaacctcctactttccccctctttgtactctttccacaattcatcttgtctttctgcagccatatcttcttaatacagactgaagtttctgtcattgagaacagagtgatccataaacctggtcatcacactttttatgagatagtaatgtgggccccagatccatggcatggtttcctctggatgcactcctggatctaatttttgtatttttagtagagacggggtttcaccatgttgaccaggatggtctccgtctcttgacctcatgatccacctgcctcggcctcccaaagtgctgggattacaggcatgagccatcatgcctggccgtaatctctgacttttttttttttttcttgagacggagtctcactgtgttgccccggctggagttcagtggcacgatctcagctcactgcaacctccgcctcccaggttcaagttattctcctgtctcagccttctgagtagctgggattataggcgcacgccaccacgcctggccagtttttgtatttttagtagagatggagtttcaccatgttgatcaggctggtctcaaactcctgaccttgtgatctgcctgccccagcctcccaaagtgctggggttacaggcgtgagccaccgtgcccggccaatctctgacttctttaagcagtgttttgtgattcttgtcatagggatctttcaccattctgattagctgtattcctagatattctattctttttgtggcaattgtgaatgggattatgtttttgatttggcttttggcttggatgttttgatgtacagagattctactgatttttgtacgtgtattttgtatcctgaaactttgctaaagttgtttattagtttaaagagctttcctgctgagactatagggttttgaagatatagaatcatgtcatctgcacacagggatagttagacttcctttcttcctgtttggatgccttttttcttttcttttctttttttttttttttttttttttgagacagagtcttgctctcgccaggctggagtgcagtggtgtgatctcggctcactgcaacctccgcctcccaggttgaagcgattctcctgcctcagcctcctgagtagctgggactacaggcacatgccaccatgccaagctaagttttgtatttttaggagagacggggtttcaccatgttggccaggatggtctcgatctcttgacctcgtgatctgctcacctcagcctcccaaagtgctgggattacaggcgtgagcccccatgcccggcagatgccttttattttcatctcttctctgattgctctggccaggatttccaattttatgttgaataggatgtttgagagaaggcatccttatcttgtgccagttttcaaggaggaatgcttccagcttgtgtccattcagtgtgttggctgtaagtttgtcgttgatgtctcattgttttgaagtatataccttcaatgcctagtttgttaagggttttaaacatgaaaaatgttaaattatattgaaagtatttttagcatctattgagataatcttggtatttgttattagttctctttatgtgatgaataacatttattgattgtatatggaaccaacttgcctcccagagatgcagcctacttgattatagtggattagctttttgatgttcttctgaattcagtttcccagtattttgttgatggtattttcatcaatgttcatcaaggatattggcttgaagttttcttttttttttaatctctgccaggttttgatatcagaatgatgctattcttatatataatgagttgaaaaggagtcctttcttttcaatattttgaagtatttttagtagaagtggtactagctcttttttgtacatctggtagagttcagctaggaatttgtctggttctttgcttttttttggctagtaggctatttcttactaattcaattttggagcttgttattggtctattcagggattcagtttcttatttgttcagtctctggaaaatgtgtctttgctcccaggttactattctcaagcttggcccaaataaactcttatattcatgttgcctcagctttttccttttaggtagtcatatcacgtagaatgagctagagcagcctctatgaggggatctctcctttgattgtactccacttgctgtaacacccaagaatgcagagtgtggttgatcctacctagaatctgcacataaggtctggcctcttcctgggatttacaggacacggccagactttaggttgagaatgtacagaaaaccaacaggaggcattttctccattgtgagttgtcaacatagacatcttaaagccccctttgacagtgtggttctttaagcttttcagatcttgttcagtgatttgccacagttatgtgagaggctccagatataaatagaatctgatgacagaatcagcattttaagagtgagatatcaaagtcataatgtatccatagccatgaccacaactatacctacctgtaaaatgtgatactggagtagagtattcttgtctttctccttacccaaaagctagcaaattgggacaagtgattaggttctggagctccaccaggccattttctatttagaatcagcctgaatctctccagcctggattatcattgggccatcagcccagggtcactaagaaccctctcacaatcacctagacgtctttgagacatttgaggatgtccagggcagaattgtgtcaggctgacaagagtggttaattctgcttctggcttggtgtaagagaaatgagtcattctgtgtgtgtgtggtttttttagggttttttttctttttttagacggagtattgctctatcgcccaggctggagtgcagtggcgcgatctcggctcactgcaacctccgcctcccgggttcaagtgactcttctgcctcagcctcccaaatagctgggaatacaggcacttgccaccatgcctggctaatttttgcatttttaataaagacagggtttcaccatattgcacaggctggtcttgaactcctgaccttgtgatccgcccacctcagcctcccaaaatgctgggatcacaggtgtgagccaccatgcctggcaattctgtgtttttttctccccttatacaagagataactttggttggtacccagatgagagtttctcaagtttcctgatacttggatgaaagcaataggaggtctggtgactcaaacagataaagtaattgttttcattttatatggccattcaaaaaacagatgaagcagtcatgatccttactatccaggaacatgtctagactaacaactggatacatgggtgaattaagcattatatggttggtacaatgaatagatgtgtccaaaaaaaattggggccactgttttatattgttacttctgataccatcagctgaggagatatttatggagtgaagatttgttattatttgtgtttcctttactttgctaagaatatatatttatcttctagtataattattctaaagaactttaataaatttgtttaaattgcttattagtatatgttataaaattgacagggcagtggcaaaaatagattaaagttacataagctctgggatttaagattctcttatgtaagcttaggaaaaacagaactggaaataccttggtggcagagagaacataattctacatagggtcctttccctgcccaaattctgttcagattcacgttttttggaggccttatttatgtctggccccgctctggagccttacctcacaaaactgatttataaaaatcagagttttggctgggtgtggtggctcacacctgtaatcccaacactttgggaggccgaggcagacagatcatgaggtcgagagtttgagaccagcctgactaacatggtgaaaccccgtctctactaaaaatacaaaaattagccgggcgtggtggcacatgcctgtaatcccagctgctcaggaggctggggcaggagaatcgcttgaacccgggaggcggaggttgcattgagccaagattgtgccactgcactccagcctggtgacagagcgagactccatctaaaaaaaaaaagactggagttttgtctggtgagtcctgctgcttttctagagctggtgctcacaattttctgaaacccaaaaacagataaatgacagaaataaactatttattttaggatcttattttttgaatttgtattaaaaccagtgcttacagaaacattccatttagcaccttgttttctgtttctgccaatctagcagttgctccacaagccacaaacaagtaaatgtatacacaataaaaatttctctaaactacattaaactttttctatgttcttctcatctgcctgtatttaacttttattctatacctttaaaacaaaatcaatgacagagaaacagagggagaaataaaaatgctgaaccctttatctaagtcctgggaattattgaacacttagtatcaacttccagggtgttattaggattaaatcacaaaatgtgttattcccagcacagtgctctgtaacatatccttgagcacatagtacctgcttaataaacattgcatttgtatatgtgtacatgttattttccaaaggcagatttattcagacattgccgccttctgtttgttctgtaaactttaaagagccagcgaagaatataaaaatttaagatggagattggttttatttgtaccagaagtatttgtgttgtgacaagagtgctaagtgtaagggactctgtgctgtacctgcttctctaactaatgctaatgagcccagggggaacaacatcagcattgacagggaacttgtttgaaacacgcattcatgaacccttttcaaacttgcagatccacattacgtagagtggggccaaaattaccaaacgagttttaagctcattaaagtttgagaggcagtgcttagctaagtggttatcagccccgtcttgttttttttgttttgttttgttttctgtttttgagacaggatctcactctgtcacccagtctggagtgcaatggcataatctcggctcagtgaaacctccgcctcctgggttcaagccattcttatgcctcagcctcctgagtagctgggattacaggcacccgccaccattcctggctaattttttgtgtttttagtagagatgaggttacaccatgttggccaggctgatcttgaactcctgacctcaggtcatccatgtgcctcggcctcctaaagtgccaggattacaagtgtgagccaccgcgcccggcctctgcccagtcttctaattaggattacatggcagaaatctctgtacttatgccctttccatggatttcgtttattgttctgggtggaagcatccatgttgttttaatgaagtgcctcatgtgactctaaggtgaggccagaatcaagtatgagggcttcaatatacattcatgagagctaagtgccacctttgcactaaagggtggtctcagggcccgttctgtttgggtttggtagggacaggggagtgtggctcatatttccattactgtagcagaaattgctggtgtctgtggcagaggagggcacctaaggacaggaaaagagaaacatacttttatattcatagagcagctcgttgttcctgaatcctttctgttataaaggacagagaaatgggtggactttttctgcaggaccttccttctgtttgtgtgcgtgatggtagcagacaaaaaggtggtgctgacatttttaaaggaacgttctcaaaatgcaggtataacttgtccagagaatgttatctaaaaaggattttcagagaaagaaagagaaaaaatggctttttttcagctaaacgtgtctcagaagaagagctgtgtgcactctgcttcatggaatgccatgtgtttagtacttgcaaatctttacttctcgatttgtgtttttccttcttaaggagtttgttttaactacattaaaaaattcttataatattcaaggctgtctgcaaaacatttctttactatataccagagctttctctacattctctacatcatggcttcttatatgccacgcagaattcctaccataaatttataatcggcactactaaaaatgttccctttgtggctgttaaacatggggagatgtagatactcaagattcctattgggggaaagctggggtccctagtaaagatggagaatatgtaatgttgaggtttcatctgttttctctattaactctatgcagaacaggattaagaaaatgcttatttaaacagaataccatttattacccagaaagttctgaaaaaaattattaggagatacctgctctctagggtgctaaagaaagactacttaaaatcactgttaaaaataacagaacatgggagatatctgtattttgaactttgtataaaactgatgtatctttatggttgcattcagattataatttactgtttgaggggcaatatcttagcagtgatgccgtgttcttctatgtgcatcagcacatcataaaaatttgttggctgggtgtggtggctcacacctgtaatcccagcactttgggagggcgaggtgggcggatcacctgaggtcaggagttcgagaccagactgaccaacatggagaaaccccgtctttactaaaaatacaaaattagctgggcatggtggtacatgcctgtaatcccagccacttgggaggttgaggcaggagaattgcttgaacccaggaggcggaggttgcagtgagccgagatggtgtcattgcactccagcctgggcaacaacagcaaaactccatctcaaagaaaaaaaaaagaagaaagaaatttagaagttcagactttactccagatcttctgaagaaaaaaagtctgcacaacagaatctccagtttattgttcacctttaaagttgagaggtaccttcgaactcaacatgtcttttttgtctgaaaaatatacacaactcaaactttatgatgtaaatatagcactcgaagtgtacaaatttttgtttatgcccttaattttatgcttctcatccagagaagtatcatatatatactggtgttatggatcttatgccattctcttctctcagagttagagaaaacattagataatatttctgtgtgaaaaattattggggccgggcatggtggctcatgcctgtaatcccagcattttgggaggccaaggcgggtggctcacctgaggttgagagttcgtgaccagcctgaccaacatggagaaaccccgtctctactaaaaatacaaaattagccgaatgtagtggtgcatgcctgtaatcccagctactcaggaggctgaggcaggagaatcgcttgacgccgggatgcagaggttgcctctgtctcaaaaaaaaaaaaaattattggataatttcagtcattcctgcaaatcagaaccaattctctttattctgtcatttcactttaattcaaataataaattctgcccgtggccacttggtaaatatacgtgtgtcttgtgtgcttgtgtttttcaggggccattgacatttagggatgtggccatagaattttctctggaggagtggcaatgcctggacactgctcagcaggatttgtatagaaaagtgatgttagagaactacagaaacctggtcttcttgggtgagaataactttagtacacaattactagtataccctaaaggtttcatttctcattttttgagaataatttttggtaatttatgctttgcataaatgagtttctgatacttgttcttaagaaaaccttgaggatttttccatataggaaagaattttttcaagaagttttatcttgacttaaactttccacattcctgggctgatctgtatccttcactctagattagtggcaattccagaaatttagtggcataaaatattgttgcccatatcttaaaatctatttgccgccaccaatttttgattaatgaatgccaggcagtgaaattaagaacctacaaatgtaaaatattttctaaatacttagaaatttctgttataaattagtatttttaggattaattttctagaatattctaccacatcctctttactaagcacagtactaggttggtaactgaagaatatgagaaagattcatgttatttattttcaataaagcaggtattgctgtttctaagccagacctgatcacctgtctagagcaaggaaaagagccctggaatatgaagagacatgcgatggtagatcaacccccaggtaggtgagagtgaacacaacagacgacatgaatgagaggtccaaaaaagaagaaagccaatgcttaaaatgttatttgagaatctgtgttccaaagcaaatattttctgggaagcctgagtttttttttttaattttgccctcgcatagggtcatcttctgtcttatgcttttaaattcaaggattctttccccttggtgatctcccttcaagtttgctatcagaaccaaagtcctcttcatggcatgcgagactcacaatctgactgcttttccattgttttgggggacacacaaatatctacatgattttgagaaactctatgttaaactattttcttttcttttttctttctttttttttttttttgagactgagtttcatgctcgttgcccaggctaaagtgcaatggcacgatctaggctcactgcaacctctgcctcctggattcaagcaattctcctgcctcagcctcctgagtaggtggaattacaggcacctgccaccatgcccagttaattttttgtatttttagtagagacagggtttcaccatgttgggcaggctggtctcaaactcctgacctcaagtgatccacccgccttggcctcccaaagtactaggattacaggtgtgagccactgcacctggccaaactattttcttagttctctttttgcatcatgtctgaaatgtgtaatagtagtggtttctgttccactgttttttgttgttgttgttaacttttctgcacactccattctgttcttattactatattctcgaaatatagtttgaaattataaagcatcatgtctttctactttgttctttttcctcacgattgctttggctatttgaagtttattgttgtttcttgtaaattttagaattgtattttccattactgtgaagaaaaatgccactgaaattttgatagggaatttattgaatctatagattacttagataataggacactttaacaatatttattttttcaatctgtagacatgcaatatttttaaatttgtgtcttctctaatttcttttattaataacatatctttcgttgtaaagattttttacttccttgttctcagaaatttatcattttaatgctattttaaattgttttctttctctgttaaagtgtatggaacaataacttcatacttgtgtgttaattttatgttttgctaatttactgagtgtattaattcagacaaatttcaatgtagtgttcatggttttttatatataaaatcatatgatccacaaacagcaactttttacttgtgttcaatttcagtggctttttaaaaatgtttttgactcattattctgccacatacttccagtgctatgttaaaatagaagcattgacaatgggcacaatgtagttttgcattagtgtctgtgaatttgaaggagcaaacaactcctcaagcttctataaactggtttcagtaggtaaagatctttttctgtcatgtctccagggtcatagaatgctctctgggtttgtagtggagagggggtgtagcttggtcacaaggctgctgggtctgcactagggtccacctttagttggcttgttacaggggcttgggtagtggtaattcccattttatttttggacagactgaatatccttcaacactttgatctgtagagcagacaatagggcaggtttctgcagtcaggttcatatataatggtccttatatcaggatgtgaatgagtatggcgtttattgagtaccggagaggattactgtagttatgcagacaaattcttttttaatggtatatcagtgttgcacagcagattttatgagtaaatatgtcacttactattactgcgcagtttcatatcagtgttttgttagtgtaggtttcttaacattgagttattgtgtttttttgtttcacttttgtattataattttagacagtttgcaattcggtttatctcttataattaagagataaatcagccatatgtctgtcacaattagatatatatgtgtgtgtgtgtttatctataaatatgaccccaatattggttatggcttatcttgtatatattctttcttagccaattttcagtggttgttttatctcacctaagtgagtagtcatggaaatattttcaccatctcttattttcaccatgtgtttaatgatgatgtttctctcacctttgtgtgagagaaacacttttgtaatttgaaggtaatttttgaaaagatttataaatctgtatttttttcagtttttcctttagaaaaattaattgttgtaaaaacacataatatttaccatcttaaatctatttaggtgtaccttttagggccagacatggtggtggctcacatctgtaatccaggattatttgagctcaaaagtttgagaccaacctgggaaacatatggagagtccctctctacaaaatgttttttaaaaatagccaggcatagtgttgtgcatctgtggttcaggctacttgcaagactgaggtgggagggttacttgagcctcagagtttgaggccgaagtgagccataattgtaccactgcactccagctttttgacagagtgagactgtgtctccaaaaaaaaaaaaaaaaaccacagctctacatttcaggcaggcatgttaattatattcacattgttatgcaaaagacttagatattttacattttgtgaaactaaaactcaatacccattaaataacagcaacccattttaccctctttccagcccttgacaaacacccttccactttctgtttttatgagtgtgactaattaaaatatcccatatcagtggaatcatactgtatccatcatttcgttactggcttatttcaggtgacataatattctcaaagtttatcttaaaatgtgacaagattttcttttttttttttttttttatttttgagacggagtctcctgtcacccaggctggagtgcaatgacgcaatctcggctcactgcaacctctgcctccctggttcaagcgattctcctgcctcagcctcccgagtagctgggactacaggcatgtgccaccatgcccagctaatttttttcttatttttagtagagagagggtttaaccatgttggtcaggctggtctcaaactcctgacctcaggtgatctgccatcctcggcctcccaaagtgctgggattacaggtgtgagtcacacgcttggcaagattttgttttttaagactgaataatatttcgctctacacatatgttacatttttgatatgcttataaatcaagagacacctgggttgctgcagccttttagcttttgtgaatactagtacaataaacatggatgttcaaatatgtcttccaggtcatgtgttgcatattttaaattgataaagaggattgctgtatttgatgataattccatttttaattacttgagaaacatttataacatttaaaaataatgactgcatctttgttttctaccaacaattgacataggttttattttcattgcatcatcaacagatttggtgtttttaaataatttatagtggccattgtaatgggtatgacatgatttcatttttcattgttatttttatgtgtttctctacaaattattaattttgcatgtcatttcaaatgctttttccatttgtgtatcttttatgataaaaatttagttcaattgttaattttcaaatcaagttatttaacttagttttaagggttttttatatattctgaatattaactgtgacatgtaatttggaaatattcttacccattttctcggaggcattttcactgagttaaatgttttgttttaatgtgcagaaattttgaagtatagcatagttaattttttgttgttgttcctcaggcatttagtgtcttatctaagaaaatggtgccaagaccaatgtcatgtcttctttctatttttttctaagagacttattagtttttttatgtctaagtattttacttaaaatatttttgtatatgattcaaagaaatgatccaaccttattttatcagtattgatatttagtttttaacattgttttttaaaagactattgtttcctcttggcagctttgtagatcatttgattatatataaaaggtttcatttctgggctccatattttgttctttcatctgttcatctgcctttgtgtcaatattacactgtttttgttactgtagcttctaattttttattattatttttgagatggagtctggctctgtcgcccaggctggagtgcagtggctcgatctcagctcactgcaacctcctcctcctgggtttcagcgattattctgcctcagtcccccaagtagctgaggttacaggcgtgcactaccacgcctggctaatttttgtatttttagtagagacgggggtttcacaatgttgaccaggctggtctcaaactcctgagctcaggtgatcccccaccctggcctcacaaagtgctggcattacaggcgtgagccactgcaccctgcctaatatgtttaaaaatcaggaagtataatgcctgtttattctttttcatgggtgtttggctatagttcataatgaaatttaaaaattttaaacaatatttgtgtaataaaactgtgctattgtcatttttatagaggttatattgaatttgttcaccactgtaggttgtattgacaacttaactaaattaaactttttgaacctttagctgaagagtgtgtttgattgactgattgattcgagacagagtctctctctgtcatccaggctggagtgcaatggcatggtctcggctcacttcaacctccgcctcccgggttcaaggaattctcctgcctcagcctcctgagtagctgggattacaggtgcccaccaccatgcctggctaacttttgtatttttagtagagacggggcttcacatgttggccaggctggtctcaaactcctgacctcaagtgattcgcccacaccagcctcctgaagtgctgggattacgggcatgagccaccatgcttggccttatttttattttatttatttttatttttagagacagggtcttcctatgttgcccatgctagtttggaactcctggactcaagcaattttcttgccttggcctctgaaagtgctagtattatagccgtgagccactacactcggcccatgtgtttttttttttcaaatatattattggatttaacagttttacttttgctatttatttatttatttatttatttatttattttactgagacagagtctcactctgttgcccaggctggggtgcaatggtgtgatcttggctcactgcaaactccgcctcacaggttcaagcaatactcccgcctcagcctcccaagtagctgggattacaggcacccaccattatgcccggctaatttttgtatttttgtagagacaggttttcactatgttggccaggttggtcttgaactcctaaccccaggtgatccacccaccttggcctcccaaagtgctggcattacaggtgtgagccaccgcacccggcctacttttgcttttaatttttagtttcattcagttttggtcagaaaacacacagtgtatgattttggttttcttatatttatttgttgttgttttgaaacaggatcatactccgtcacccaggctggagtatagtggcataattttggctcactgcaacctcagtctccttgactcaggtgatcttttcttcctcctaagtagctgagactacagacatgcactaccgtgcctcgctaattttttgatttttttgtagtgacagagtctcactatattattcagtctggtatcaaacttctggtcccaagtgatcctcccaccttcatcttccaaattgttgggattagatgtatcagccactactcccaggtggtattctttaataagacttgttatgtgtcctaacagaatatatcacatccaaataaaaatattgtgtattctcttgcttttaactggaaagttttgtacatgctgttaagcctatttggtctgtggtacagtttggatgtccatgttctgcaaggctcatgctgcaatgtaatacacaatgttggatgtggaacctggtaggaggtgtttgggtcatggggactaattctcataaatgccatggcaccattcttttagtaatcagaaagttttcactacattaattcaaatgagagctggttcattaaaataacctgtctccttcacctcacacttgctctgtctcttaccatgtgatatgtccagctactctgccttccactaagattataagtttcctgagaccctcaccagaagcagatactggcacacacttcttatacagtctgccaaactgtaaaccaaataaacctttttactttataatttatccactctcagttatttgtctatatgcaaaatagttaatacagtctataatgttgtctgttttcttactgatcttttatctaaattttctatttattattgcaaatgggatcttgatgtctacaattattgtgttgctgtatatttcttgctttacctttgccaaaatatgctttatatatattggagtcctgatgttatatatacatatacatataaacataaatagatagatatgatagttatagattcttgacccatttggccattatataatatcagtgtttgtctcatgttagtacttgacttaaagcatattatattcaatataattactgccacctcacccaattatggttactatttgcatgtaatatagattcttttcattctattactttcagcctatttgactcaatgctaaaatgagtctgttatagacagcgtattgtatgcttttttacttaaactactcaggcatcttatttctttttctttttataaatttatctatttttgagatagagtctcattctgtcaaccaagctggtttgcagtggcatgattacagctcgctgcagcctcaacctcccaaactcagatgatctcatctcagcttccaagtagctgggctgcaaatgtgtgtcgtcacgcccagctcattttattgtttttgtttttgtttttgtagggacagaattttgccatgttctccagtctggtctcagactcctgagttaaagtaatcagcccctctgggcctcccaaagtcctgagattacttttttttattaagtagtttaattaatttatatttaaaatgattgcttaaagaaataaagttactattaccagtttcattgttattgttttgtttaaatattattttttgtgtgttctgggatacatgtacaggatttacaagtttgttacataggtaaacatgtcccatggtggtttactgcacctatcaattcatcacttaggtgtgaagccctgcatgcattagctgtttatcttgatgctgtttcccctactctgacaggttccagtgtgtgttgttcccctctatgtgtccatgtttgtttttgtttttgttgttgttgagacagagtcttgctctgtcgccaggctggagtgctgtggcatgatctcagctcactgcaaactctgataccctggttcaagcgattctcctgcctcagcctcccaagtagctgggattacaggcatgcaccaccattctcagctaatttttgaatttttagtagagatggggtttcgccacactggccaggatggtcttgatctcctgacctcgtgatctgcccacctcagcctcccaaagtgctgaaattgcaggcatgagccaccgtgcccagcccatgtgttcttattgttcggctctcacttacgagtgagaacatgtggtgtttggttttgtgttcctgcattagtttgctgaggataatggctttcagctttatccatgcctttgcaaactacatgctcttattcttttttatggttgcatagtattccatagtgtatatgtaccacattttctttatccagtctattattgatgggcatgtgggttgattccatgtctttgctattgtaaatagtgctgcaatgaacatacacatccacatatctttataacagaattatttatattcctttgggtatatacccagtaatggggttgctgggtcaaatggtatttctgtttctaggtccttgaggaattcccatagtgtcttccacaatgattgaactaatttacattctcaccgacagtgtaaaagtatttctatttctccacagcctcatcagcatctgttgtttcttgactttttaataatcacgattcttggccgggcacggtggctcacacctgtaatcccagcactttgggggtgccgaggcaggaggatcacaaggtcaggaaattgacaccatcctggctaacacggtgaaaccccgtccctgctaaaaatataaaaaattagctgggcgtggtggcggacgcctgtggtccccgctacttgggaggctgaggtaggagaatggcgtgaacctgggaggcagagcttgcagtgagccgagatcgcgccactgcactctagcctgggcaaagagtgagactccatctaaaaaaaaaaaaaaatttagaaaaaaataaccactattcttactggcataagatggtatgtaattctggttttgatttgcatttctctaacgatccctgatgttgagctttgtttgtttcttggccacataaatttattcttttgagaagtgtccatgttctttgcccactttttaatggggttgttttattcttgtaaatttgcttaagttccttttagactctggatattaacgtttgtcagatgaataggttgcaaaaatgttctccgattcttaggttgtctgttcactctgatgatagtttttttgttgttgtgcggaaggtttttagtttaattagattctatttgtcaagttttgcttttgttgcagttgcttttgacgttttcatgatgaaatctttgtccatgcctatgtcctgaatggtattgcctagattttcttctaacgtttttatagtttttggtttcatatttaagtctttaatccatcttgagttaacttttgtacaggtgtaaggaagggttccagtttcagttttctgcatagggctagccaattctcccagcaccattcattaaatagggagtttgttcctcattgcttgtttttgtcagatttttcaaagatcagatggttgtagataagcagtcttatttctgagttctgcattctttttcattggtctatgtgtatgtttttataccagtaccaggatgttttggttactatagccttgtggtgtagtttgaagtcagatagcatgatgcttccagctttgttctttttgcttagaattttcttggctatatggggtcttttgggttccatatgaattttaaaatagttttttctaattctgtgaaagatgtcagtaatagtttagtgggataagcattgaattacttttggcagtatggccgtttttacaatattgattatttctatcttttccatttgtttgtgtcctctctgattttcttgagcagtggtttgtgttttccttaaagaggtccttcacttactttgttagctgtattcctaggtattttattctttttgtagcaattgtggatggaggttcgttcatgatatggctctctgcttgtttactgttaatgtattgaaatgcttgtaatttttgcacattgattttgtatcctgagactttgctgaagcttcttattagctgaagaagcttttgggctgacattggggcattctagatatgggatcatgtcatctgcaaacacagacagtttgacttcctatttgaataccccttatttatttttcttgcctgattttcctggccagaacttccaatactacgttgaataagagtggtgagagagggccttcttgttgtgccagttttcaaggggaatgcttccagcttttgccctttcggtatgatactggctgtgggttcatcataaatgactcttattattttgaggtatgttccataaatacctagtttattgagcatttttaacatgaaggtatgttgaatttaatcaaagaccttttctgcatctattgagataatcatatggattttgtttttagttctgtttatatgatgaattgtatttattgatttgtttatgttgaaatagccttgcatcccagggatgaagctgacttgatcgcggtggataagcttttcgatgtgctgctggatttggtttgccagtgttttattgagaatttttgcatcaatgtttatcagggatattggcttgaagtttcttgttgttgttatatctttgccagatcttggtatcagaatgatgctgatcttataaaatgagttagagtggagtccctctttttctatcatttggaatagtttcagaagaaatggtaccaactcctctttgtacctctggtagaattcagctgtaaatccatctgcctctgggcatttttagtttgtaggctatttattacttcctcaattccagaacttcttattggtctattcaggattcaaatttttcctggtttggtcttgggagggtgtttgtgtccagtaatttatctacttcttctagctttttcagtttatgtgcatacaggtgtttatagtattttctgatggtttgtatttctgtggggtcagtggtgatatcctctttatgattttgtattgtgtctatttcttcttctctcttttgttctccattactctagttagtgttctattttattaatgttttcaaaaaaaatagctcctggatttattggttttttgaagggttttttgtgtctctatctctttcagtttcacttggattcttcttatgtcttgtcttctgttagctttggggtttgtttgctcttgattctcttgttcttttaattgtaatgttagggtgtcattttgagatctttccagctttttgctgtggctatgtagtgctataaattttccccttaacactgctttagctgcattctacagattctagtacatagtctctttgttctcattggtttcaaagaatttcttggtttctgatttaattttattatttacccagaagtcattcaggagcaggttgttcaatttccatgtacttgtgtggttttgagtgagtttcttactcttgagttccaatttgattgcactgtggtctgagagactgttatgatttcagttcttttgcatttgctaaggagtattccttccaattatgtgatcaattttaaagtaagtgccatgtgacacttaggagaatgtgtattgtgttgtttttggctggagagttctgtagatatctatcaggtccatttgacccaaagctgagttcaagtcctgaatatctttgttacttttctgtctcaattgttggtctaatattggcagtagggtgttaaagtctcccactattattgtgtgggagtttgtttaagtccctttgtaggtctctaataatgtgttttataaatctgggtcctccttgaattgattcctttagcattatgtaatgcccttctttttctgttttgatctttgttggtttaaagtctattttgtcagaaactacaattgcaactcctccttttttcttcttttatttgcttggtgaattttcctccattccttcattttaagcatgtgtgtgtctttgcatgtgagatgggtttcttgaatatggcacaccaatgggtcttgactctttaatcagcttgacattctgtgtcttttaatgagggcatttagcccatttaaatttaagattaggccagccacggtggcttatgcctgtaatcccagcactttgggaggctgaggcaggtgaatcacctgaggtcaggagttcatgaccagcctggccaacatggtgaaaccccgcctctactaaaaatataaaaattagcctgtcatggtagtgctcatctgtaatcccagctgctcaggaagctgaggcagaattgcttgaacctgggaggcagatgttgcagttagtcaagattgtgcactgcactccagcctgggtgacagaacaagactccatctcaaaaaaaaaaaaaaaaaaagtttaaggttaatattgctatgtgtgaatttgattatgttttcatggtgctatctggttattttgaagactctttgatgtagttttttcatagtgtcattggtctttgtacttcagtgtgtttttgtagtggctagtaatggtttttttctttccatgtttagtgcttctttcaggagctcttgcaaggcaggcctggtggtgatgaattccttcagcgtttacttgtctgaaaatgattttattcctcctttacttatgaagcttagttttcctggatattcttggttggaaattcttttctttaagaatgttgagtagtggcccccaatctcttacggcttgtagggtttctgcttaaaggtctgttgtcagtctgatgaacttttgtctataggtgatgtggcgtttctctctggctgccttatcatttattcctgaatttcaatcttgaagaatctgattattatgtgtcttggggatgatcttctcatggagtatcttactggggttttctggattttctgaatttgaatgttggcctttcttgttaggttggaaaagttcttctggatgatatcctgaaggatgttttctaacttggttccattctccctatctatttaaggtaccccagtcagtcataggttcggtctttttacataatctcatagacctcagagatttctctcattcccgtttattcttttttcttcaatcttgtctgcctgttttatttcagcaagattgtcttcaagctctgaagttctttccttgcttcgtctactcagttattgatacttgtggttgcgttgtgaagttctgatgctgtgtttttcagttccatcaggtcatttatgttcctctctaaattggttgttttggttaacagctcctgtaatgtttttcatggttcttagcttctttgcattgggttagaacatactccattagctcagcaaagttcatcattacccaccttctgaagcctacttttgtcaatttatccaccttagccaccgcccagttctgtgcccttcctggagatatgctgggatcatttggaggaaaggaggcactctggctttttaagttttcagcattttttggtttattcttttcatctttgtgagtttttctagcttcgatctttgaggctgctgacctttggatgggatgcttgtgaggatttttttgttcatgctgtttttgttgttgctttctgtttgtttttctaaccatcaggccacttttctgtagcactgttgtgatttgcttgggatctacttcagaccctatttgcctgggtttctctcacacctggaggtgtcaaccagtggagcctgcagaatagcagagaggactgcttgctccttcctctggggtctttgtcccagaaggggaatgatctgatgacagtgggaacactactttataagttgtctgacgatgtctgttgtgggggtctcacccagtcaggatgcatgagatctgggaaccacttaagaaagcactctggctgcaccttggtggagtggctgtgctgcactgagggaaattccatacatctgtactgcctggattgctcagagccagcagggggaaagactaagtctgctgatctgcagaaaccacctcattgttcctgttttatgtatttcttgtagataagttttttctcatttcctgttttactacctttatttttgttaactttatcgttacatgctttgattattttttcattttttgcatactttttataaatattatgtaatcaccttgaagtataatgtaatcatcttaaaatggagattacataaaacatcttttttttttttttttttttttttttttttttagtatttattgatcattcctgggtgtttctcgcagagggggatttggcagggtcataggacaatagtggagggaaggtaagcagataaacaagtgaacaagggtctctggttttcctaggcagaggaccctgcggccttccgcagtgtttgtgtccctgggtacttgagattagggagtggtgatgactcttaacgagcatgctgccttcaagcatctgtttaacaaagcacatcttgcaccgcccttaatccatttaaccctgagtggacacagtacatgttttagagagcatggggttgggggtaaggttatagattaacagcatcccaaggcagaagaatttttcttagtacagaacaaaatggagtctcctatgtctacttctttctacacagacacagcaacaatctgatttctctatcttttccccacattccccccttttctattcgacaaaaccgccatcgtcatcatggcccgttctcaatgagctgttgggtacacctcccagacggggtggcggctgggcagaggggctcctcacttcccagaaggggcggccgggcagaggcgccccccacctcccggacggggcggctggccgggcgggtgctggccccaacctccctcctggacggggtggctggccgggcaggggctgccccccacctccctcccagatggggcataaaatatcttaaagttaaaaaaataaggccaagcatggtggctcacacctgtaatcccaacactttgggaggctgagatggatagatcacctgaggtcaggagtttgagaccagcctggccaacatggtgaaactgtctctactaaaaatacaaaaattaggtatgtggtggaggacatctgagactgaggcaggataatcacttgaacccagatgacagaggttgcagtgagccgagattgcgccactgcactccagcctgggtgacagagcaagactccatctcaaaaaaaaaaaaaaaaaaaaaaaagtaaaaaagatatattttaacttcttaaactttaattaaatacaaaacctatactgctatgttttccagtttgttattgatactacaaattatattatgtatctattaacagatttatatcttgtatttttatatctacagaactttaacggttttatgcaccattatgatagtaaaaaattctatatgtatctgtatatttatatttaatagggagctttatatatggttttatgatgctgtctagcatcattttatttttcaacaaaatggattcattttagcatttctatttgtttatatgcagagtctgtgtttctcagactggatcttggactcctggtctcaagagatctgactgccttggcttcctaaagctgtagaattacaggcatgagccactatgtctggccaccatgtaacatttcttgttacatttcgtgcaacatttcttgttacgtttcctgcaacatttcttgttacatttcgtgcaacatttcttgttacatttcgtgtaacatttcttgttacatttcgtgtaacatttcttatagtgaacaccctgaaatttaatttaggaaagtctgtatttttattttgtttttcaagtaaaataactttgaattaaatattattggttagaattttttattacatcaaaatttgggaagttctcagctttcgttttctttaatttacctctgtattactttttccctacattattcttctcttttttttttttgagacagagtctctctctgtcacccaggctggagtgcggtggctcgatctcagcctcagcctcccgagtagctgggaccacaggcgcccaccaccacacctggctaattttttgtattttttcagtagaggcagggtttcaccgtcttagccaggacggtctcgatctcctgactgtgtgatccgcctgcctcggcctcccaaagtgctgggattacaggcatgagccactgtgcccagcccccctatattcttctaagatttatttcatgaatatattgatggacttgatggtgtccaataagttttacattccatatttttcttttgttttgcaattttatatttttatgttatatattttagggtatgccacctcataccaattaactgtgttttgatgttttagtttatattgtaattgtgtatgacaatgtttaactctgtacaatttaaggcagtttggagcaaaatcaaatataaatcagccatatgtctattgccaatataattatctctttttccctgtataaatattctctctgtattttttatgacttgtatatttgttatgtaggtttgttgtgagtggttgttcaatcttgtctaggtgagcagtcatctcctaatttcaatatctattgtgaatctatattatttttgtgtggaagaaacactcttggatttgaagattatatacaaactatcataactttgtgtcttttttaggtattattgtttatttttacttgtcagaaccacataacaaaatttattatcaaacattttaaaatatgctgtttaggccaggtgcagtggctcatgcctgtaatcccagctctttgggaggacaaggtgggaggattgcccgaggtcaggagttcaagaccagtctggctatcttggtgaaaccctgtctctactaaaaatacaaaaactacccgggtgtggtggcgagtgcctgtagtcctagctactcgggaggctgaggcaggagaatcacttgaacccgggaggtagaggttgcagtgagctgagatcatgccacctcactccagcctgggcaacagagcaagattccgtctgaaaaaaataaaatatgctgtttagtcatattaattatatgacaatgttatgcaacatatccctataatatttatatgttgcaaagctaaatctcaatacacattaaacaagaaccaatttttctgactttctggcactttgcaagcaccactctgttttctctttctaagagtgtaactgtttcatgtatcttctacagtctctttttgtggctggctcatttcattttgcataatatcatcaagctttatctttataattgttagaatatttttggctttttaagtcctaggtgatattccagtatttttatattttaaattatatctactgaataatttggtgacagaaatttgcattccttttacctactggctttcagtagcaatgctgcaataattatggatatgcaaataacttcatatggccatatatgtgaacatttatatatgtgctaacttctattttattagttcactttgttttgagacagtctcactttgtcacccgggctggagtgcagtggtgcgatctcggcgcactgcaacctccacctcccgggttcaagtgattctcctgcctcagcctcttgagcagctgggactacaggctcgtaccaccaagcccagctaatttgtttatttttagtagagatggggttttatgttggcctggatggtctcgatctcttgacctcatgatccgcccaccttggccccccaaagtgctggaattataggcgtgagccactgcacccagcctattagtccactttttagccattatactcataccaaattgtttttattctgtaactttgtaatgtattttgaaatcaggaactataatgacttcaacattgttcctttttttgaatactttgggtactttattgtcttttgagagtccatatgctacttttggagttgctgtttctgtttcctcaaaaatgcaatgagaaattaaaaaaaaaattgcattaaatctctgtattacattgagcagtatggacgtcttcaaaatattaattatttcaacctttgaacaggagcatgctggagaatgtgtttaatatctatatagttataaatttttcagtttttgtctgttttatactcatttcattttggtcatagaatgtaattcataaattgtttttaaaaacttaaaaattaaaaaaatttgttaagacttctttttttgcctaccaggtggtctatcaaggagaatgttgtatgagctactgagaagggcatgcatcctgatattgttgaggtgtcttctctatacctctgttagaaatagttgttttatactgccttcaagtcctctctttacttactaatattctgtcttgtgttatttttattacagaaagttgggtattgaaatgtcctaccataattatattactgtctaagtgttttttccattctttcaatatttgctttatatgtttggagacttaatgtaagatacaaacacacacacacacatatatatacataggttcccagtaaatgaatgtattattgtttaatgtctttgtctctttgcagttttgacctaaagtacattttataaactatgacagtttttgacttaagatgtagcttgtgtaatattattttggtctcttctgctctcatttggttaatatttgcatggaatgtctaaatccatcttgccactttcaatccttttttgtcattagattttagctgagtcttgtagaaaggcaagttgcatcttggtgtgagaaacaaactcacctatccaaacccaaagaatggactcagggacctggagaacagcgaaagtgagacttttaatgacggtcttgcaagattgagtgtctggcatacaggcacacgcagcacagtttcaacaaacaattatctcttagtgcacaggtccctccccctggttcctcataggctgactactattgggtcacagtcttcccagatgtcacctattggcaagggctttaggtgtttcttttacgagttgtcttgttgcattttgttgcagcccaaaatgcatcgcgactgttcaggactcttcagacatttgatttgtggccctagtggctgcacttagctgataagaaagggtacaattatctatgttgcaaactaacctaaattttttggtggggtggagggggtgtggttgcggggaccctgacctataggcgcctggctactgggtaaaagagaaggcaggaaggaggggggtgatgactcagtacactctgcttctttatgtctttatttccatgtaacctgcttaaaactaacgcacttagaattgagaatggaccatcacatataggttattttctacattggtttttttatttttatttatttatttattttgatacaaagtctcactatgtcgcccaggctggagtgcaatggcatgatcttggctcgctgaaacttccgccttccaggttcaagtgattctcctgcctcagcctcccgagtagctgggattacaggcaggtaccaccacactgagctaatttttgtatttttgctagagatgagatttcaccatgttggccaggctggtctcaaactcctgacctcaggcgatccgcccatcttggcctctgaaagtgctgggattacaggcgtgagccactgcgcccagccaaaaatttttttaataaatcactttattgaactcatgtcacttgagtggaaagttagttatatatatgtatgtgtatatatataaactctgaaacagaaagacattaatgttattttattgttgtatttgattcttgtatctttgtctctcattttctctcttaatttgtgtcttttttgtttttatgttgatatacttttacttctttcttattttgtttgtgtatctatacaaatatattatttgtgctatcttggggattacataaaacctctaaaagatacaacgatatatttcagtctggtaaaaagaaaaaaacttcagttacatgcaaatattttttctcattacatctgccctcaaatttttcattgatgtttgaattatattttttatgttgtatattaactaacagatgtttataatgatttctatgcttttaactttcaaattttagaaaataattaaaaatgttttctgcaccattataataatgcttaaaaattcaatttttgtgtttgtgcatatcttttccagaaaataatgtatttttctatgatgatgtgttgtttcattgaataatgttattttcagtagaagcaactgcttttagcatctttttatatgtagagcatacggagtaccaatgcactttttcagaatttggttattttttaaggttttttttttttatttagcaggacatatttgctgatggtattatactcacttgatagctatttttttcaggactttgactatatcagacagtacccttctggcctgcaaaatttttgttgacaatttactggctgtgtcataagactatgcttgcaaatgacatcacttttatcttgcagtttccaagaggctgtttttgtctgtgacttttgaaattgtgcttatatatgtgtttgttataaatatctttgtgtgtatcctagtttgttttttgagcttcttcatttttacgtcttttttttttttttttttttttttgagacggagtctcgctctgtcgcccaggctggagtgcagtggcgcatctccgctcactataagctccgcctccccggttcacgccattctcctgcctcagcctcctgcgtagctgggactacaggcgcccgccaccacgcccggctgattttttctttttttagtagagacaaggtttcgccgtattagccaggatggtctcaatctcctgacctcgtgatgcacctgtctcagcctcccaaagtgctggtattacaggcgtgagccaccgcgcccggccgtcattttttctttcaggatttttcagttagtctttttggtattttttgccttcataatttctgtttttctggtattttacatatttttgttcttaccctcatttttctgattttctgtagttctctatgtttctgtgtcactcactgagtattattcaatttgttttcaatttttaaaattaatatatacattttttatggtttctctctgaaacttttatatttttgataaaaccatattgccttattttgtatacattgtaatctttgattgaaatttgtacatttaaaaaagctacctgtcacaatccttataatgtagctttgtcctggcatagtctggacaattgtcttgattagagatactgggagtctctcaaacatgttgctagaatgtgtcttgtctacaattttgtgtttattttttaattaaaagagtttgtgtttcttctttttttagtttttttttttgtttgttttttgtttttttgtcagacggggtcttgctctgtctcccagactggagtgcagtggcgcaatctcggctcactgcaccctccgccacctgggttcaagtgattctcctgcctcagcctcccaagtagctgggaatacaggtgtacgctatcacacctggctaacttttcttttgtttttttagtagagatggagtttcaccatgttggccaggctggtctcaaacttgtgacctcaagtgatccgccagccttggcctcccaaagtactggaattacaggcatgaaccaccacaactggcctttttttgtttcttcttaatagtaataacttgctacacctgttttctgtgtgtggcactgcagtctctctgctgctgtaacatttagctttggtctcagcagacttaaactgtcattccaaagtataccaccatttctttcagcactagatgtcataggagacagaaaccagtgtatagataggtccctagaagcaagtaataaagatgtatgtggcagtattttaattgtcttttaaaaaagaaaccaaaagttggcagtggggagcaggaagagctgtgttgggtaaatttaacagacttttctttttcttctgtgtcactctctatgttgtgctcagctggggcacttcacacacttaacttatttataaattttcctcagatgtatttttgttggatgtttttgttacatttacatgtctgtaaaaaattagggcctttgggccaggcgcggtggctggtgtgccaaagtgcggtaatcccagcactttgggaggctgaagtggacgcatcatctgaggtcaggagttcgagaccagactggccaacatggcgaaaccccatctctactaaaaatacaaaaattagctgtgcgtggtggtgcgtgcctgtaatcccagctactttggaggctggggcaggagaatagcttgagcctgggtggcggaggtggcagtgagcagagatcacgccattgcactccatcctgggctacagaatgagactctgtctaaaaaaaaaaaaaaattagggcctttattattttgctatgccatcttgtttatgtagtttgtataattatatgggttagatttgtaaagcatattcatctgagtctagtaaatggagtaatttgttatttttatttctttcagttacatattctcattttgcccaagacctttggccagagcagggcataaaagattctttccaagaagtcatattgagaagatatggaaaatgtggacatgaagatttacagttaagaacaggctgtaaaagtgtggatgagtgtaatctgcacaaagaatgttatgatgaactaaaccagtgtttgacaactacccagagtgaaatatttcaatatgataaatatgtgaatgtcttttataaattttcaaatccaaatatacaaaagataagacatactggaaagaagcctttcaaatgtaaaaaatgtgacaaatcgttttgcatgcttttacacctaactcaacataaaagaattcatattagggaaaattcttaccaatgtgaagaatgtggtaaagtctttaactggttctcaacccttactagacacagaagaattcatactggagagaaaccctacaaatgtgaacaatgtggcaaagcttttaagcagtcctcaacccttactacacataagataattcatactggagagaaaccctacagatgtgaagaatgtggcaaaacctttaaccggtcctcacaccttactacacataaaagaattcatactggagagaaaccctacagatgtgaagaatgtggcagagcttttaaccggtcctcacaccttactacacataagattattcatactggagagaaaccctacaaatgtgaagaatgtggcaaagcttttaaccaatcctcaacccttactacacataagataattcatgctggagagaaaccttacaaatgtgaagaatgtggcaaagctttttaccgattctcataccttactaaacataagataattcatactggagagaaattctacaaatgtgaagaatgtggcaaaggctttaattggtcctcgacccttactaaacataaaagaattcatactggagagaaaccctacaaatgtgaacaatgtggcaaagcttttaatgagtcctcaaaccttactgcacataagataattcatactggagagaaaccctacaaatgtgaagaatgtggcaaagcctttaaccggtccccaaaacttactgcacataaggtaattcattctggagagaaaccctacaaatgtgaagaatgtggcaaagcttttaaccaattctcaaaccttactaaacataagataactcatattggagatacatcttacaaatacctagaatgtgataaagcctttagccagtcttcaactcttactaaacataaggtaattcatactggagagaaaccctacaactgtgaagaatacggcaaagctttcaaccagtcctcaaaccttattgaacaaagtaattcatactggagagaaaccctacaaatgtgaagattgtggcaaagcctctaacccgtcctgaattcttactaaacataagaacattcatactgaagaggaaccctatgagtgtgaagaatatggcaaagccttcaacaagtcctcaattcttaccagacataagataattctggctgggtgcggtggctcacacctgtaatcccagcactttgggaggctgagacgggtgaattacatgaggttgggagttcgagaccagcctgaccaacatggtgaaatcctgtctctactaaaaatacaaaattagccatgcgtagtggtgcatgcctgtaatcccagctactcgggaggctgaggcaggagaattgcttgaacccgggaggcagaggttgaagtgagctgagatcgcgccattgcactccagcctgggcaacaagagtggcactccatctcagaaaaaaaaaaaaaagataattcatactgaaaagaaactctacaaacttgaaagatgtgacagtgcttttgacaacacctaaaacttttaaacataaaaaatcatactggtgagaaatcctagaaatgtaaagaatgtgacaaggcctttaaatggttgtcacacttcattataggtaagatagttcatactgaagaaaacttctacaagtgtgaacagtgtggcaaaacttttaatgaatgctcacaccttattgcacaggagagcatttatacttgaaaaaaattgtacaaatataaagaccatgaaaaagccattaatatctattcacatcttaccactggagagttcatacttaataaaaggaatataagtgcaattactgtcaaaagatctttcagaaaatataaacctttaaagcgaagaaggtatttattttgaagatgaacactacaaatgtgaagagggttgtagtacctttatttgtatcacagattttattgtacacattttgtactagaagaaaactctgaagtagttgctcaaactttgttcaacatcagggaatttatattgaagaaaaactttgcaaatttaataaattttaaaaaacactttttcaaaaagtacagcttagaagacaccagagttcatactaaaatatatttttgcagatgcagtaaaaatgaaaatatttaatccaaaattaagtctatgtaaatatcagagaatttactgtagaaatatataaggcactgagacttcagatattatactaaatcagagtgctgagtatagaaaataaaactgaagttggggccaggtgcagtggctcacacctgtaatccagcactttgggaggccgagaagggtggatcacctgaggtcaggagtttgagaccagcctgactaacatggagaaaacacggctctactaaaaatacaaaattagccagctgtggtggtgtatgcctgtaatcacagctactcgagaggctgaggcaggagaattgcttgaacccgggaggtggagagtgcagtgaactgaaattgcgccattgcactccagcctgggcaacaagagtgaaactccatttcaaaaaaaaaaaaaaaaaaacaactaaagttggtagaaaaattatttgtatataactttaaaaggagtagaagggctttttgcagagttattacgtttgaagtatactttatttcttgaaaaaattacagattttttgtaaataatgatgtaattcaactctcaaaatatttcctactgtttctttattccagttgtattcacatgtgaaagcatgtgatcagttattgctgcattaaaaacatgagtcttttttattaggtggccattatttatgatcttttctatgaaagagtaaggacattaaaatgtaagatgcatgatgaaaaattaagtgaagaggctctttatggttaatttatattgaataatgcattaggtaggtgttcagagtaatattttgcgttgtgagaacatttttaattttatttaaaattaaatgaaaataaattagtatattattgtactaattgtacttttgtataataaaatccagtgtattttaaaaatgttaggttatgtgtggttaatattttaatccaatatttttaacatgttaaatactattgtgcattcaatgaagtgttattatgccacgaactttaacctgttccactttacttaaaggtatagatgaaagataataacaataaggggccaggcgtagtggttcacacctgtaatcctagcacttcgggaggctgaggtggatgaatcacgaggtcaggagttcaagaccagcctggccaacgtggtgaaaccccgtctctactaaaaatacaaaaattagccagttgtggtggctggcgcctgcaatcccagctacttgggaggctgaggcagaagaatcgcttaaaaccagaaggtggaggttgcagtgagccaagatcgcggcactgcacctgggtgaaagagtgaaactctgtttcaaaaaaaaaaaaaaagatggtaacaatatactatttggcaacatagtggattaacatcttgagtaatctcttttgtcagtgggtttaaactgcaaattagttaaagaatattgcttctgtaggttaaatttttctttttcaattatttaaatttatttttaaaatttttgtgggtacataatatgagtatatatttatgccatatatggcatattttgatacaggagtaccatatataataatcacatcagggcaaatggggtatccatcacttctagcaataatttatcctttgtattacaaacaattcagttctacacttttagttattttaaaatgtacaattgttatcggttacagggttatttttatggtcataataaaaaatatgcaagtataaataaaatccatacatttctgagtcctgaataaatattattaaaattttcttacatatatttttgaacatgtggcctgtctgcctacaaacacatacaaacttttagttttgatttacatagagttaaatatatattagtctaaagataaatcttagttgtaagaaaactatggaatatgagtttgtccctactttcagaaaaaaaaagagcaatataggaacaaaacaagtcattttaacaaggtgactactagaaaactaaaaacctcaaaaatgcaaaagcaaacatatactctctgctttgtattgaatttattactgtataatctatgccttatacttcggaatctccccatgcaaattctgtttatacttgcctggtactcatgatagacccctactttttggtattttgtatatttattttatagtttatgaaatattcattatgtgagctggaatgtgagtataagaataatttttatgaaatgtgcatacaaaataattttatatgtaattccacaattagtatattaagttacattttatttagctagaacactccattttgttttcaattggagaaccctatataagcttactattctttagttattgttctttttactttttataattgacaaagtaaatttatttatggagtcaaattgttcaggtaaatacaagggaagcttagtaagtcatgaagatgtttttacatgtaaatgtggaaagcatatatagcagttcttggtgtgtaacatgctccagaaaaagccataaacatttctgctaaagttagtttgtaacttcaagtcagagatagaaaatattagtagtgaagaaatacagctgatgttttatgtggagaggacacttccaggctgcaaagctgagtgttgctgaattaaaaaaaaaaaaaaaaaaaaaaaatgtggcctggcacggtggctcacacctacaatcccagcactttgggaggccaagacaagtcgatcatgaagtcaggagttcaagaccagcctggccaagatggtgaaaccccgtctctactaaaaatacaaaaattacctgggcatggtggcaggtgcctgtaatcccagctacttgggaggctgaggcagagaatcccttgaacctgggaggcggaggttgcagtgagctgagatcacaccactgtactccagcctgggcaacagagcgagactccgcctcaaaaaaaaaaaaatgctagctgggtgcggtggctcacgcctgtaatcccagcactttgggaggctgaggtgggcagaccacaaggtcaggagatcaagaccatcctggctaacacggtgaaaccccgtctctactaaaaatacaaaaaattaactaggcgtggtggcaggcgcctgtagtcccagctactcgggaggctaaggcaggagaatggcatgaacccgggaggcggagcttgcagtgagccgagatcacaccactgcactccagcctgggcgacacagcaagactccgtctgaaaaaaaaaaaaatgctgcttttattttcttcagatttgtttgtattatgtgtattctagctatgtatgcatcacagcccttatttttctatgttatggctacagttttctctttgttgtcttcatgccatttcatttcacatggtactttgtagattttgatgagaaacttcataatttttaatgccctgaaaaaatgtttttgttttctatttctttaagatggagtttcactcttgctgccaaggctggagtgcaatggtgcgatctcggctcactgcaacctctgcctcctgggttcaagtgattctcctgcctcagcctcccaagtagctgggattacaggtatgcgccaccacgtccagctagtttggtagttttagtggagatggggtttcaccttgttggtgaggctggtcttgaactcctgacctcaggtgatccacacacctaggcctcccaaagtgctgggattacagatgtgagccacagcaccaagcatgaaaaattgggtttaactggagagtttgcttatcaatataactttcagatcagtgaattaagataaaggcatacactgtccacaggtgagagaattaaatcagttgcatgggttttgtttgtttgtaaaagaaaaagcttattacattgttatacaaagtgtggcaaataaaaaatttgctagaaaatataccttaaaaattatttatttatttatttatttatttattttgagaaagagtctcactctgttgcccaggctggagtgcagtggcgcgatcgcagttcactgcaacctccacctcccgggttcaagcgattctcctgcctcagtctcctgagtagttgggattacaggtgcgcaccaccacgcccagctaatttttgtattttaagtagagacaggttttcaccatgttggccaggctggtctcgaactcctgacctcgtgatccacccaccttggcctcccatagtgctgggattacaaacactgcacggagactttattttttattttattttattttattttattttgagatggagttttgcttctgttgcccaggctggagggcaatagcacgatctcggctcaccacaacctccacctcccaagttcaagcgattctcctgcctcagccttcccgagtagctgggattacaggcatgccccaccacaccctgctaatcttatatttttagtagagatggggtttctccatgttggtcaggccggtctcgaactctcaacctcaggtcatccaccctcctcggcctcccaaaatgctgggattacaggcatgagccactgcatctggcaaaaattaaatttttaaaagagttaatggtaagtgaacaattttatattgaattctctgtgatataacacaacttatgtttccatgcagaatcttctaagcgtaaatgttaaaggttgcaaaataataaaatgacctctgtgaatttgcaatttggaagaattttttttccatattgatattgaaatttggaggaatttctctcattttgtataatttttttagtgggtgaagttcagtcttcagtttttatttttagtcacctaactatagccaactcctcagtcattttctctggataacttttggagatcctgacagttttgggattaaaacatttactgttagtttgcatgtaaactagttatactgtgttcacagagtggccagttatgggaccataggcaacaactgcccccttagtgtctttcataccattaccatcatcaccagaaactccaggtgccccaagcttaaagcaaaaatcctgaagtacatcagctcctcccttgcaacgtgctgggtttggaacatgctgttaaaatatcagagttcctggccagacatggtggctcatgcctgtaatcctagcaccttgggaggctgaggcgggcagatcacgaggtcaggagctcgagatagcctggccaatgtagtgaaaccccgtctctactaaaaatacaaaaacattaggcagtgtggtagcacacacttgtaatcccagctactcctgaggctgaggcaggagaatcgcttgaacctgggaggtgaaggttgcagtgagctgagatggagccactgcactccagcctgggcaacagggggagacttccgacctcaggtaatccacctgcctcggcctctcaaagtgctgggattacaggcgtaagccacagtgcccggccttgaactgttgattctatattttgtcttttatgaagagtgctgcaaacaacatagaagtgcaaatgttcttcattaggcattatctgtttcggacacatatccaatggtgcaattgctatgttacatggtagtttgattttaagttttttgagaaacctctatttcatttttcataatagctgtcttcatttacattcaaaccaacagtatgcaagtattcccttttcttcacgtctttaccagcactttattctttttctttttaataagagtcatattataggagtgagttgatatctcatagtgttttttggcttgcctttccctgatcataattgacaatgagcatttttaaatatttctgttggccatatgtatgtcttttcttgaaaaagacttatttaaggcttttgcttattttaagttatttcttttttgttgtagtcatttgagtttcttatatatttttaatattaactccttgtcacatgtatgatttgcaaatactttctctcattaattagttgtctcatcctgttgattgtaccacattctgtgcagcagctttataatttgaagtaatctgactaatctattttttcttctattccctgggattttgaggttaaataaactctctgcccaggacaatgtgatggggatttcactctattttttagtaatagtttcaggccttacatttaagtatctaatttattttcgttgattttttaatatggtgtgagataagggtctcattttactgtgctgcctgtggatatagttttctcaacaacatttattgaagatactgttctttccttaagaaatcatcacctttatttaaaatcagctagctgtaaatacacagatgtatttctggtctctttctgctcaattggcctatatgtctgtttttattcagtaccatactgttttagttactatagctttgtggtatatttcagtcaagtagagggatatcttcactttttttttttaattgctttggctatttggatcttttgtggtaccatatgaattttagatatacatttttaaacttcttttttttttttttgagacaaagtctcactctgttgcccaagctggagtgcagtggtgtgatctcggctcactgccacctctgcttcctgggttcaagtgattctcctgcctcagcctcctgagtagctgggattacaggcccaacatgtgcgcaccatcacgcccaactaagttttgtatttttagtacagatggggtttcacgatgttggtcagactggtctcaaactccttacctcaagatctacccacctcagcctcccaaagtgctgagattacaggcatgagccgccatgcccagcctactttttaaaatttctatgaagtatgtcactggtattttgatagaggttgcattatatccatagatcattttgtgtaatacagatacttaattactaataatgccaattcatgaatgaatattattttatgtgtatattacttaatttgtttaatgttctttagagtataatgcaagatgtttcaactttttggttatatttatttcaaagcatagttactaaagttagatggaattgttttttaatttcgagatagttattgtatagaaatgctgcttacttttggatgtagcttatttattctgaaagtctaataactttgtttattagttctaatagttttttgtaaagtcttaggcttttctatacttcagatgttgtatagaaataaaagattattatacagggataatttacattccttttttccaatctggatacttttgattttactctctaatttctttgtcttggatatttagtactatgtttagtaagactgactagagtgggcatccttgtcttgttctagctcttagagtgaaagcttgcaacatatccctgtttagcatgttattagctgtgcattttttggttatatgtggcatttattggctgaggtgcatttgttccatacctgtttttttcagagattcatcataagggagtgtcaacttttgtcaaacttttcttctgcatctatttctttctttttgtgctttgcatctatttaaatgttagatttgtgaaatcacaataaatcctacatagacaggaaaaatcctcagagactactatgaacatctctatgcctgcaaactagaaaattaggagaaaatagataaaatcctggatacacaaacttccaagattgagccaggaagaaacagaagccttgaacaaagcaaaaatatataaaatagataatgaaattgaattagtaataaaaaacctaccaagtgtgattcaacatgtaaagataataaaaccaaaaaatgatacgattaacacaatagatgcaaaaaaaagcattcaagaaagttcaacattcatgaaaatattctccacaaagtgggcattgatgaaacatacctcaaaataataagccatctatgacaaatcctcagctaacattatacttaagcaaaagctggatgcattctccattagaataaaaataagacaagaatatcaactttatcccttctattcaacatagttctggaagtcctagtcagagcaattcaacaaaataaagaaataaaaggcatctaaagcctggcgcagtggctcatgcctgtaatcccagccctttgggaggccgaggcgggaggatcacctgaggtcaggagttcgagaccagcctgaccaacatggagaaaccccatctctactaaaaatacaaaatttgctgggagtggtggcacgtgcctataatcccagctactcgggaggctaagacaggagaatcacttgaacccgggaggtggaggttccgatgaaccgagatcatgccattgcactccagcctgggcaacatgaacgaaactccatcccccccaccccactccccccaaaaaactcatctaaatagaaagagaggaagtcaaataatcttcactgattatataattctctacctagaaaacaaaagattttgggccaggtgcagtggtttacgcctgtaataccacactttgggaggccgaggcgggtagatcacttgtggtcaggggttcaaaaccaccctggccaacatggctaaaccccatctctactaaaaatacaaaagtagctgggtgtggtggcgcatgcctgtaatcccagctacttgggaggctgaggcaggagaatcattcgaacctgggaggcagaggttgcagtgagctggaatcacaccgttgcactccagccactccagcctgggtaacaagaacgaaattccgtctaaaaaaaaaaagttcaccaaaagactccaaagcttaatgaatgactttagcaaagtatcaggatacaaaattaatatacacaagtcacatttttgtataccaataacattcaaaatcaagaacagttttattttatttatttatttttgagatggagtttcactcttgttgcccaggctgaagtgcaatggtgtgatctctgctcactgcaacctccgcttgccgggttcaagcaattctcctgcctcagtctcccaagtagctgggattacaggcgcgcaccaccatgcccggctaattttttgtatttttagtagagacggggtttcaccatggccaggctggtcttgaacttcctgacctcaggtgagccgcccgcctcggcctcccagagtgctgggattacaggcatgagccaccgtgcccggccaagaagagttttattttgaataaccacagacaaaaaataatatacctacatatacactaaatcaaagaggtaaaatatctctacaagaagtacaaaacactactggaagaaataagagacaatgcaaataaataaaaaagcattatatgctcatggatttgaagaatgaatgtaattaaaatgtctatgctgcctaaagcagcctacagactaagtggtatttctatgaaactatcaatgacattttttatagaattaaaaaaagaaggccaggcgcagtggctcacacctgtaatcccagcattttgggaggccaaggcgggcggatcccaaggttcaagagatcgagaccattctggccaacatggtgaaaccctgtctctactgaaaatacaaaaattaccctggcgtggttgagcacgcctgtagttccggctactcagaagactgaggcaggagaatcgcttgaacccaggaggcgaaggttgcagtgagccgagattgtgccactgcactccagcctggcgacagaaccagactctgtctcaaaaaaaaaaaaaaaaaaaaaaaagccgggtgcggtggctcacgcctttactcagcactttgggaggccgaggcaggcggatcacaaggtcaggatatcgagaccatcctggctaacacagtgaaaccccatctctactaaaaatacaaaaaattagccgggcatggtggcatgcgcctgtagtcccagctactcgggacgctgaggcaggagaatcgcttgaacctgggaggcggaagttgcagtgaaccaagattgcgccactgcactacagcctgggtgacagagtgagactccgtctcagaaaaacaaaaacaaacaaacaaaacaaaaaagctattctaaaatctatatggaataataaaagaaccctaatagccacggcaactttatacaaaatgaataaacctggaggcctcccattaactgactttaaactactacgagttacagtaaccggtgtaacatggttcaggtacaaaaatatacatatagaccaatataacagaagaaagagccctgaaataaagctacacttttacacccaacttatttttgacaaagtcaacagaaataaaggggaaataactccctgtttaattaattgtactgggaagactggttagtaatatgcagaagaaaactggacgcctacctcttcccatataaaaaatgtaactaaagacatattaaagacttatctgtgagtcttcaagctacaaaaattcaagaacacctagaaagtactcttctagacactggcgtctgaaaaaaaaaaaaaaaaaaaacttaaaactaataaaagtgagtgcaacaaacataaaaatcagaaattggcatctaattaaactaaagagcttctgcaaagcaatagaaactatcaacgaagtggacaagctacaatatggaataaaatattcgcaaactgcatacaatgaaagattaatatatagaatctataagaaatagccaggagcagtggctcacgcctgtaatcctagcactttgggaggctgaggcaggtggatcacctcaggtcaggagttcgagaccaacctggccaacgtggtgaaaccccatctctactaaaaaaaaaatacaaaaattagccgggcatggtgacgcatgcctgtaatcccagctactcgggaggctgaggcaggagaatcatttgaaccccgggagatggaggttgcagtgagccaagatcgtgccacagcactccagcctaggcgacaagagtgaaactccgtttcaaaaaaaaaaaagaaaaagaaaaaaatttaataagaaaaagggcggcgaatgatatgaatatgcatttcccaaaggaagacgtgagagctgccaataaacatgcaaaaattgctcaacatccctaatcatcagagagatgtaaatcaaagtgacaatgtgataccatttcccagcagttagaatggctgttattaaaatgtcaaaaattggctgggtgcggtgtctcatgcccgtaatctcagcactttgggaggccgaggcggctggatcacctgaggtcaggagttggagaccagcatggacaacatggcaaaagccagtctctaataaaaatacaaaaattagccagcgtggtggtgggcatctgcagtcccagctacttgggaggctgaggcaaaagaattgcttgaacctgggaggcggaggttgcagtgagctgagatcgcaccactgcactccagcctgggtgatagagtgagactctgtctcaaaaacataataataaaaaatttaaaaattgaaaatgttgaagttgtgaagaaaagggaatctttatacactgttggtaaaaatgcaaattaatttagcctctttaaaaagcagtttggagatttcttaaaaaactaaaaattgagctgccatttgacccatacacctcattactgggtatctacccaaaggagaataaattatttttctaaaaagacatctgcggtcagccaggtgcgctggctcacacctgtaatcccagcactttgggaggccgaggcgggtggatcacgaggtcagcagtaagagaccagcctggccaacatggagaaacctcgtctctactaaaaatacaaaaattagccaggtgtggtggcaggtgccagtaatcccagctactcaggaggctgaggcaggagaactgcttgaacctgagaggcggaggttgcagtgagccaacaccacaccattgcactccagcctgggtgacagagcgagattctgtctcaaaaaaaaagacacctgcaatcagatgtttattgcatcactattcacaatagcaaagacaccgaagtaaaccaggtactcatgaaacttagattgaataaagaaaatgaggtccttatacaccttgcaatactatgcagccacattaaaaaaatgaagtaatgtcctctgcagcagcatgaatgcaacaaatggccattattataagcaaattaacacagatcaggaaaacaaatactacatgttctcacttacatgtgagaggtaaacattggatgcacatggaaacaaagataggaacaataaacactgggaattccaaaaagaagaaagaaggaagggaaaacaagccctgaaaaactacgtatctacaaaattagccgggcgtggtggcacatgcctgtaatcccagctattcaagaagctgaggcaggagaatcgcttgaacccgggaggtggaggttgcggtgagccgagatcgtgccattgcactccagcctgggcaacaagagcaaaactccatctcaataaaaaaaaaaaaagaaagaaaaactacgtatcaggtataatgtacatatgtacataacttgggcaatgggattattaagtgcccaaatgtcggcatcatgcagtatacctatgtgacaaatctgcacgcataccctcaaatgtaaaataaaaagaataaaatgctttgggctataacaacatcacatttttctagctcttggttaatagctgaaattaggggtgaaagacaaggaattatatcccctttgggcatggggtgaatgtttctattccaggtcaccccaaattttatgagctaacatctataaaagctcttggcctatagcccaaggttttcttctcaagtatgcagttaaaataaatgactctacatctttattttttattaactgtacgttagactatagagttaatttgtcactctgctctttggggaataaatattagtatacaacctgtattactttaataaagaaattatttctttagttttgattcttcaggatgattcaattccctggtgagagaataacttacttattaaggtaatagatgtagggaagactcattactcttgaccaacatctcccccaccaccagccccaggcaatcatcattctacactttgcttttattagtttgaattttttaatattctacatagaaatgagataatgtagccaggcatggtggctcatgtctataatcccagttacttgggaggctgaggctggagaatcgctttaaccctgggaggcagacattgcagtgagctgagatggggccactgcactcctgcctgggtgacagagagagactccatctcaaaaaaaaaaaaaaaaagaaagaaagaaaacaaaacaaaaaactacaactacataaacaacaaggcacttaacatgatcttcagaatttgtgggggccccacagatgtaacttcctgttgggggtctgggtgcagctagttgttgtaagtttctgtgctgcccatcatcctcatggaaactgaagctgggatggaaatttaaagggtaagatgaaacatgatgacagcaagaaagctgaagctcttaataatgaatattttttaaaataataatgccataaaatagtaaggtggctaaattacttgctgtaaacaaactcacaatttgaaaataaaattaattttttgcccatttcaagatagttgaacaggagtttctgaatgtatctgcttgctaggtctagttggcatattaaagccgacaattttttttttttttttttttttttttgaggcagagtcttgctctgtcacccaggctaaagtgcagtggtgagatcttggctcaccgcagcatccatctcccagattcaagtgattatcgtgcctcagcctcccgagtatctgggattacagacgtgtgccaccatgcctggctaatttttgtatttttagtagagatgaggttccaccatgttggtgaggctggtctggaacacctggcctcatgtaatccacctgcctcggtctcccaaagttctgggattacaggcgtaagccattgtgcccggccaaagccaacaattcttattgagaactttctacttctgccattaactgtcattttatgctttatatgttgggatttttgttaggtacaaatatatttacaactatcatattatcttgatagatttacaattttttcaatataacatgttgtcatttgccagttaattacaacacttttgtcttaacaccttctttttctaagtgtagccaccccagctctcttttggttactatctgtatgaaatcttttcatctaacctttcattgtaaaactatttgtgagtttagaactaaagagagtctcttgtagataacataaatttctcgaatccgggcgcagtggctcatgactgttatcttagtactttgggaggctgaggtgggcagattacctgaggtcaggagttcaagaccagcctggccaagatgacgaaacctcgtctctactaaaaatacaaaaattagccaggtatggttgcaggtgcctgtagtcccagctttactcaggaggctgaggcaggagaatcgcttgaacccagaaggtgaaggttgcagtgagccaagatcataccacttcactccagcctgggtgacagagcaagactccatctcaaaaaatataaaataattttaaaaaaacataaatttctcttcaatttattttatagtccctctctctattaatattttctatttgcagcatatttaggataggtaatttagactttttctaggctttctaatgcctaggcttcctctaagactttttctgttcatatctgttacttattcataggccatgttttcttatttctttgcatgccttgtatcttgttgctgaaaactggacattgttctactataatataaaaaccataaaatcttacgtactcttatcctttgggtttttgttcctgcttattttaacttgtacttttgtgcttagttttcaaaattattattaatattattattattattattattatttgagatggagtcttgctctgtcactcaggctggagtgcagtggtacgatctcggctcactgcaacctctgcctcttgggttcaagcaattccctgcctcaggctcccgaatagctgggattacaggcatctgccaccacaactggctaatttttgtatttttagtagagacggggtttcatcatcttggccaggctggtcttgaactcctgacctcgtgattcacctgcctcagtctcccaaagtgctgggattaccggctaaaagttattttttttaaatactgttttttgttgtgtttggcaataaaaatctgtttctttagcttaatgcgaactagtgatttgaaagagatttacctcaaatgcctgctcacctcaaatgtacatttcctaattcttgcagctgggtttacacagctaggaagattacaactttgccaccttcttctcttcttgcatgtttagagattgagggtaaagcagagatgagagagaacatcttcttaggtctttctgagcatttgcctggcctttgactgaccctgaacatgcttatgagcttctagattcttagaaatatgtggacaattttcaaagccctaatcctacaagcacttcactcctcagttttgtctcatatatactacgtgacttttgcttgcccagattgatattctttttcccaggtataatgagtagttaatttgtccttaaatatttttgccaaaaattaggttattgattctaaattgttgtttatgttttatgtaggtgtttactgctatgaatttctctgaacagtttgctgcatctcatatgtttgataggttgtggcttcattttcattcatctgaaaatattttcaaatttttttttttctttgacacattagttacttagaagtatgttttatttccacatatatgtgagtttctcaaactttccgcatttatttatttttactttctatgaaagtcagagaacatactttgggttatgtttatccttttaatttattgatgtttccttgctgtatggcctaccatgcaatctatcctgaagaataacctatgagtacttctctttttttttttgagatggagtctcactctgtcaccagggctggagtgcagtggcacaatctcagctcattgcaatctctgcctcctgggttcaagctattctcctgcctcagcctcccgagtagctgggattacaggcgcctgccaccatgcctggctaattttgtatttttagtagagatgaggtttcatcatcttggccaggctggtcttgaactcctgacatcaggtgatccacccgccttggcctcccaaagtgctgagattacaggcatgagccaccgcacccggccacctatgtgtacttctaatcttgagaggagatttctgtagaaggctatttatatttgttaacagtgttgttcatgtgttatattttcttgctgatattctgtctagtttttctattatttaaattcaggtagaaaagtttctgatctgacaacctcggccattggatttaattatttaacccattcatagccaatgatattatcaatatagttggatttacactggccattatgctttttgctttttttctttttgagatggagtcttgctctgtcgcccaggctggagtgcagtggcgctatctccgctcactgcaagctccgcctcctaagttcataccattctcctccctcagcctcccgtgtagctgggaccacaggtgcccaccaccacacccggctaattttttgtatttttagtagagatggggtttcaccgtggtctcgatctcctgacctcgtgatccgcttgcctcggcctcccaaagtgctgggattacaggcatgagccaccgcacccggcctctttttcttttttcttttcttttttttttttttttttgagacaaagtctcactctatcacccaggctggagtgcagtagtgtgatctccactcactgcaacttccacctcctgggttcaaacacttctcctgcctcagcctccagagtagctgggattacaggcacccaccagcatgctggctaatttttgtatttttagtagggacggggtttcaccatgttggccaggctggtctcgaactcctgacctcaggtgatccacccacctcagcctcccaaagtgctgggattataggtgtaagccaccatgcccagcatatttttattcttcctttactgctttcttttatattagatacttcccatataatatttaaatttctatagtgattgtttatgtttttgcagttactttctttttttttttttttttttttgagacggagtcttgccctgtcgcccagactggagtgcagtggcttgatcttggctcactgaaacctctgtctcccgggttcaaatgattcttctgtctcagcctcctgagtagctgagaatacaggcacctgccaccacgcccagctaattttttttatttttaatagagagggggtttcaccatgttggccaggctggtcttgaactcctgacctcatgatctgcccaccttggccttccaaagtggtgggattacaggcatgagccactgcacccagctactttcttattttctctaggccttataacatagatctttttataatctgcttcatgtttatattaacttaattccaatgagatataaaaatattacctctatatggttcttttgccttgatttagactgaatttagtttttatcaaaatgtatagggtaagccctaacctgcaatgtgattcttttttttttttttgtattttagtagagatggggtttcaccatgttggccaggatggtcttgatctcctgacctcgtgatctgcctgcctcagcctcccaaagtgctgggattacaggtgtgagccaccgtgcctggcagagaacagcaattttagaaagtgattaagtttaagtaagtttatgtgagttggatggaaaagccataggcactcaatgccagcttgtgaaagcagctgcaggggctgtactctgcagagccacaggggtggagctgcctaagaccttgggagctcaccccttgcatcaaagtggcctagatgtgagacgccaagtcaaaggagattattttggaactttaagatttaatgactgccctgctgggttttggagtttgatagacccagagcccttttgctttggcaaattctcccttttggaagaggaatatttacccaatgcctgcacatgcattgtatcttgaaagtaactaacttgtttttgattttacagactcataggtggaagaggcttgccttgtctcagacaagactttaaactggacttttgagttaatactgaaattggttaagaatttgggggactgatgtgaagggatgattgtgttttgaaatctgagaagggcatgaggtttgggagggcccaggggcagaatgatatcgtttgactctgtatccccacccaaatctcgtgtcaaattttaattgtattaatataggtaggggtccagttgtgttctgcataagatcagctttaaactttatttttaaaacaaaaaaagagccaatttttaatgataaattattttgcttcttatttttcagtttggagaacctctagtatatttataatattttataatttattgaatttatgatatcttaatacatgagataatttaaatactttataatatttcaagtgtcattttttcttatttcgttatgaaaattgctaatagatacatttttttctggttatcacaaaactatctgaaaatgtgacatttgccatttatcaaatcttcattgttaatactttacctgaatgggggcttgtaatatgtattataatttttcatgttgtcttaaattaattcggttttattattttattttatttaaaaaagctaaacttataaaattggttgtatattagtttaggtgaaattgcttagtgatgagagaaaaataatttgcaaaatatagagactggatagtttttttaatttttttttttttttttttttgagacagagtttcgctctgtcaccccggctagagtgaagtggctccatctcagctcactgcaagctccgcctcctgggttcacgccattctcctgcctcagcctcccgagtagctgggactacaggcgcctgccacggcgcccggctaattttttgtatttttagtagaggcttgttttataatttataatttagtgttagccaggatggtctcgatctcctgacctcgtgatctacccgcctcggcctcccaaagtgctgggattacaggcgtgagccaccgcccccggcggataattttttataataaaaatgttctttatgtttgccccttaccatttttttttttttttttttttgagatgaagtttttgctcttgttgcccaggctggagtgcagtggcgcgatctcggctcaccacaacctccacctcccaggttcaagcgattctcttgcctcggcctcctgagtagctgggattacaggaatgcgccaccacgtgcggctaattttgtatttttagtagacggggtttctccatgttggtcaggctagtcttgaactcctgacctcaggtgatccacccgcctcagcctcccaaagtgttgggattacaggcgtgagccactgtgcccagctgcctataccattttctttgaaagttgaagttttaactccctaattaggaaacatattcataaatgtgacttgtaaatactgaaatttgtgtttgctttttctgccttcagtagaaatggtgttttctagcatctatgtctttttaaaataaaagagaggatggaagcagaataggttgaaaatgctattaacaaaatgatgttgacagagatgatctatctggtctaccagggcataaaaatttcaaaaatcataatcagtacaaaacctctatgtccgttaatattacagaatattgcttgtgttaaaatcatttatgttggccgggcgcagtggctcacgcctgtaatcccagcactttgggaggccgaggcaggcagatcacgaggtcaagagatcgagaccatcctggccaacattgtgaaaccccgtctctactaaaaatacaaaaaaaaattagctgggcgtggtggcgcgtgcccatagttccagctactttggaggctgaagcaggagaatcgcttgaacctgggaggcggaggttgcagtgagccgagatcgagccactgcactccagcctgggtgacagagcgagactccgtctcaaaaaaaaaaaaaaaaaaaaaaaaattatgttaaaaactctgcctcgccgagtgcggtggctcacgcctgtaatcccaacattttgggacgccaaagcaggcggataacgaggtcagcagttagagaccagcctggccaacatggtgaaaccccgtctctactaaaaagacaaaaaagtagccgggcgttgtggcgggcgcctgtagtcccagctactccggaggctcaggcaggagaatggcgtgaacccgggaggcggagcttgcagtgagctgagattgtgccactgcactccagcgtgggtgagagagcgagactccgtctcaaaacaaacaaacaaacaaacaaaaaacaaaacaaaaaaactctgcctctcatgcatttagtagagataaagtcagagggcagaaccctccgctgatccttatcaggacacctgaagtacagatgatatatttctgttttctctcaaactccatattggatacagttattctgcttctaatccatattattacagtaatgcacagacacgggatcataaaagaacttgcaagctttttaaaaaagtgttatattttacacatgtgtgtatgtatttgtagacagctctgtcatcttggccagagtgcagctcaatcaaacctcaaaattcttagctctcagcctccttggtaaatgggacttcacgtacacaccactacagtggctaattaattttttttttttttttttttttttgtagagatggggtcttattatgttgcccaggcagctctttttttttttttttttttttttgagacagagtctccctctgtcgccaggctggagtgcagtggcgcgatctcggctcactgtaacctccgcctcccgggttcaaacgattctcctgcctcggccccccgagtagctgggaatacaggcgtgcggcatcacacccaggtaagtttttgtatttttggtagagacagggtttcaccttgttagccaggatggtctcggactcctgacctcttgatccacccacctcggactcccaaagtgctgggattgcaggcgtgagccaccgtgcctgggcgattctattttattcgttgatcttttgtggtgcttttacaattttacatctacatattataaatccagtaacaaagagtcataattgttgcttttaatagtgataggttgctttaaaactgaagggtacaatttagtcagatactttggtgctatgcaaatacaatgcttattttttaagtgttatttacaatttttacactcctcagttaaccttggatacaataataactggtggttttgtgatggtttctttagcattttatctatgttgattagtatttggaattctgtaaaaaaaaatttccctatccttttttcttttttatttatttaaagttttttgtgtatcagtgtaaatgcatgggtatttatttatttgacttgatttattttataggtcagtgctctaattattcatttggatgctaacattgttccaggatggaccattgggagttctttcaggctggctccctttgacatgttcccatcattttttaaaattaaaaaaaaagaaagaaaaaacattttgaggctgggtgcggtggctcacgcctgtaatcccaacactttgggaggccaaagcgggcagatcacctgaggtcaggagttcaggaccagcctggccaacatggtgaaaccccgtgtctactaaaaatacaaaaaattagccgagcatggtggcgcgcgcctgtgatctcatccagcagtgctttacttgtaattattttattcctgctgccgtctcctctttctttggccactatctgttccacccccggaacggaagagagatgttggtagggagaggctcttccttcacctctggcagaaaaggtttgcttgggcccttcacaccgctgacatcagagctgcacttcaatgtggcagttattggccatgtgtggcgcctggtctgaagtgcgatgctagaaaggtaaaatacagagttagtttcaaagatttagttccaaatatttatatactttattaataattacatatttctcacacattaaaatgaaaatttttttgatatattgggttaattaaattgttacaatcaattcaacctgttcttgtttctttttcaagtttggctactagaaaacttaaaattcacatatggctcacattttatttcagaggattacctcctttctaaaatctcagcctgcctgctcaaagaccagaaagaagccaggaaggtcataaaatctgaaattttaaaataattgttattataaaattatattttttcctttgtgaagagccatatattatttataaatgcatatgactttacacacaagtttaaaggcaaattccctctggggtgggcctggctcagctctgggaggaagccctgcctgagaaggctgcagcctaggctgtcaccctttcttcactcagcccagcaactgatcacatcttctgtcactcagggcacgagaaggtggggttttaaaagttatccaatcagcgacgctgggttgggaaccgtccaatcaggcctgcagctggagcggacaggacggcttcggggatgtggcggggcctttgtctctcgctgcagctggagctgcaggtctcgccttcactgccctgtgtcctctgctcgcagaggcccagcctctgtggccctgtgacctgcaggtattgagagatccacagctaagacgccaggtaccccggaagcctagaaatggtgagagtgccgggtccgacatcccgagagaggggaaggggcgggttgtaagcggtgggaagtggctgtggtgggacttaggcctccccgcagtcaactctacaatctgcgcccggagttctccttgctcagctcggcctcagtccccttcagccataagatggcggctgcgctgactgcgggatcccgggcgtcctgtcttttccctgcgcagtgactgggccctgacctggagtcctctcagggcagctctggaccctcagcggcgcgtctctcccggattgtgcagggaccactggagggtcccaggggtagaatcctgactcggggtgcgggtttatgaatgggtccgtggggttccagttcctcttctgttgaaaatgtatgggagtcaccgttaaaacactaaagcatttaatcaaagcgtgattcaaaaattgtggagcacccagctgtggtttgtaatttatggtttatgggcggggcttgaagtaaagacttttataaacagcatgatgaagaaaaccaaattcagtaattggttaggttcagatacatagtttcttaatttgtaaaataaaggtgaaaatttcctggttatgtaattagatgttaattggcagtttatagttggttaaggatgaattttgtttctctcaatgtagtaatttactaaaaatgcacctcagttagattttttttttttaagatggagtttcgctcttgttgcccaggctggagtgcaatggggcgatcttgtctcaccgtaacctctgcctcccgggttcaagcgatccaatgcttcagcctcccaggtagctgggattacaggcatgcgccaccacgcccgtctaattttgtggttttagtagagacgggtttctgcatgttggtcaggctggtctcgaactcccgacctcaggtgatctgccctccacggcctccccaaagtgctgggattacaggcgtgagccaccgcgcccagccagatttttttaaaagtaggaatccagggactagagacacctcagtctaatttcccgccgcttaattattttcacactccatggggaactgattttctggtgcatttttcaactgtgtcccaagcactgtcttaaatctaacctcccgtcccccatatctccagcctcactctggcttgcagtaagatattaaatttccagttcctcctggcattccctaatgccagcttttcctccctaattcacgttatcacctgtttgtcttttagtgtacttttgtataccatattttaattaattattttttgacaaagctttaaatgacgctttttaaaaggtttgttacctgtttgtaactttcccatgagaagaaagcaaagaataatcccctgacactgtattgtaaaatttctctgtgcctcttctccttgtatcttctctaggtacaaagatcttgtcagaatgtttttgggtcaaggtattcctttgaaacctttatgaggtgatgtgtcctcagccaccctttagtttttttctggtcgtgggtttcagtactgtctggggatcaaccaagatatccaccatggttatgtcagctaaagtgcctagtgaatatcagcttctggtttattttcttccatagggcgacctgaggtctggagtgtatcctctcaagggagcaagtggatccctggggcagagaggaagcttctagtgtactcttactttgaaaaggtaatcagatgctggtactgaggggaaaacacagaaataacatctgcctcctggattgtctaaggggtagaaatataatgaaataaatgtagtgaaagaaaaaatagtgttaaaaagaaaaaaaaattgtgacagaaaaaatagtatcccaaaagaccaaaaaagaaaaaaaaaatcaagcaaacaaacaaaaaacacaaaaaacctgactccagcagtcaggattttttccagcagttccattagcacttaagttttcccttttggagaagaaaaagatccccatgtcctatggtcttgtagatgcctaattctgtcacccatagccatcagcaaggttaactgagatggtgtaagagcttgcaaagtaaaatgcctctggagcagccaccgagaaatactgcagtgtctcctgaatgggtgcttcttgagcacataagtgagtaggagtgggtggaagaatctctcaagtgactgaatagcctgacttgaaacatgagtcacacacatctgttatttaaccatcattgccacttctggatttgtcaccttgaagagatttgttcacttattttgacctcagttttttagctgtaaattgcattatattagtagggcttgaaaggtaggaaattttttttttttttttttttgagacagtttcactcttgttgcccaggctggagtgcagtggtatgatctcggctcactgcaacctccacctcctgggttcaagtgattttcctgcctcagctggccaggctggtctcaaactcctgacctcagatgatctgccctccttggcctcccaaagtgctgggataacaggtgtgagccaccacgcccggccagcaggaaaatatttacaaagggcataaaagagatgggttttagaaaaagaaattaatgcttaattatatattccatttgttaaaaattctcatttacctttttctttcccagagtgagtttaaaaggtttctcaggtgtgtttgttttttatggctaggtgaattcaaacagaatttcaaggctcagcttttagaatgctagctaccgaggaaaagaatagggaaaatctctattctattttggctgtagaaaatgaatacatgtccataagaaaatgtggtagataattggtgagtaaacatagattcatgaaaacatcagttgctctatctgcaggataggatttttgacagtgaatatctgtgttcacatcctgttatcttgatttctgagtttcatgctacattttatgagatgaaacttggtaccacctagaagtgttcccatatgactaattgtttactacatgatttttaatgaaaacaatacaataatagatatattttcataaaggagtagatacttttgctttttttattgaggtataaaatgtaagtaccttaaaatttccttcccttatatgaacactgtgtttgagtaattttgctggatttttcaaacacgtagtttcaaaaaccaagtgagtaactctaacatggaaactaaagcttgagcccagtgtctcagagctaaggctaatattgagcctacaaaaggaggttattaaaggaccagctagtttatttatgggggatgctcccctgcagatgtccagtctgctcaccccagccatggaagaagcctttctgctgacagagccctggaaagctgaggacccacaggcaaatgcagttaaggttaagatgaaaggggactgagagggtcttactgatgataaagttgttattgttttgaggcagtttctaggctttggaatatcaaacaaagttaggtttatgtaaaaaaaaaaaaaagaattccaaaggagtattgcaacaggaaaaagtaccaactataaaaattttaaggattgcatagtttaggccaacaagggctttctttcctagggagcagcaaacaagattagaaagaaggcaggagagcaatggcaaatgaagggtgaaaagtcagattttaaatcagagaatgttttaccatgaaatcagcatgttcttagaagagacataaaatgagattttatgttgactcagactgagaatagtttaaagttctggggcctgtgaaaaattttatttagaccactgaagacaaattcagctgaatcttttaatgggaaaaagaagaaaatgtgcagagttcttactagaacaaggtcccaattcaagccccacaagagggttcttgatttcgctcaagaaaatattcagggtgagtccacacagtaaagtaaaaggaagtttattaagaaagtaaaggaataaaataatggcttactccataggcagggcagcaccgagggctgctggttgcacatttttatgcttatttcttgattatatgctaaacaaggggtggattatttatgccccccaattttagaccatatacagtaacttctgatgtttccatggcatttgtaaactgttacgacactggtaagagtgtagcagtgagggtgaccagaggtcactctcgtcacatcttggttttggtgggttttatttgacttctttactgcaacctgttttatccgcaaggtctttaaaacttgtatcttttgctgaccttctatcctgtcctgttacttagaatgcctaaccatccaggaatgcagcccagtcagtctcagccctattttatccagcccctattcaaaatagattttctctggttccatatgcctctgacatctcccccttctttttaacatgggcacacttaatcctaagagttgtagagggatgaagattcattttctgtaactacttcatgctgaacaggggtgatgatatttttgcctaactagtcagagtcttcttgaccctgaaaaacaaaacaaaggatcagtgacattttatgcaaagtcaaaaaatataacttcagtcttctattagttcagtccattcagttaattcctattctgtttgatagtcatgaacatttcagttctccatgaatactgaaagttttttctgtattctaatgtcacaatttctaaagttacaacaaacttgcatttgagaacatctgtcaaagtcttaagttaactataaatcatcttttgaagaggatcaacacaacttgattgtctgcatgggaaagtcttagggcagtctcagcaaaaaaaaaaaaaaaaaaaaaaaacatgatcgacaaggaaatttggttagctctgtggcataaaataattttatgtaacaattgtgattattaatgatatacacttagtcattagaattacaggagtttcccataattttggaacacataccaataacatatttacaaaaacagtccaaaaatagtcaaacatgatttcacatttgacatgttttctatgtgattttttatactaaatgagccaaattttactattatatttgtgtattattaatgtcaaacccaattcttaatctttatagacaaacctatccaattttagtatttgaccgtaaggtaatattcttataaaccttttataactctttacaaagtccttgttgtttaagagtagatcagtgctttaagagaaacctgttgtttttatctcaatgttcaatttatagaaaaactgaataatacccatttaactttatatgttcacacacagaaactcttttgcaattaaattttagcaaatctttcacaatttgtttaaaccttcagttttattctaatttaaaacaatcctttaaccttttaatccaggcaaaaaagtccacatttccatgtcttcttataatcttttatcaaaaacacatttcactttctctgcataccttgcatgtaaaactgttttttagtagtcaaagttacatgttacaatgttaactcttagcaacttttacttttgatgaaacccttggtaagtaaaggattttaattacgtactaggcgtggagtccaggacacagacacaagtttatataaggtctgactccagtgtattaatagttagggggtgtggctaacttgatgtgtcccaggccttacctagccgtaaagcaggcaagttgtacagtgaacagtgatagtggcattttgagaagtctttaagaggcctagtaacctttaaattgtacaacatttcttgcataaatttcttttagtgaattatttcatgacttatacagaccatctataatatgtttggactctctgatttgtcctaaacatccatctttttaaataaccagtcattttattttaggataataatttactatacaacatcttttcttatataaaatctcttttctttataacctttgtatatttagggggcatggctaattccatatgtcccaaggccttatttggaatctactggcttcaagataggtaaattgaacaatttttaaaagtcaaagaaccaatttatgaccttaaagtatttggcaaatctaatatctgacctatataatttagatcaaatggtttatattttgaagacatttttattttcccaatgatctttaaaactgtttttatttcaaaaagattacttgtcacatgaactaaaaggcattgcactttttacttttctgacaaaatatttgatttaagctcttattatttttaaaccaattaatcagggttcttttatatcacacacacagacagaagattcagtagttgtaaggtttttctttgtcagtttcttaattggattactagcccacgaccaggaaagcatgtagtttctatggcttaataagtaaacagctggacaacaaaatggattccccctaaattaaggctcccatttttacatcagatcttgtatctaaaaaggagagaatcagttcatcccaagggaagtcttatttctcagtgggacatggggacacctccatacttcctaagtggtccagagtatgtttctctgatccaaatgtgaagagctgagtttttccccataattgcccttagccattccaaaagtatatttctcacccagttattacatgccaaagttcttttataatgtgaagtaattcctgatacccccaaaagtaaaaaacatcagataatgcaatgcaaaacagaagagaaacttagattttgagagggatctattcacttccaattcctggggtttcataaggaaaaagaggtgtttcccaaaacagggtctatagtgtctcttctgtttttcccaaggagtcccaggctgctagagcttgaatatctgcttttaattaagctgacttttaaccatagtgctcttttaaaaagtccttttaaatttcttattaccagactttagtcaggtcaaacggccaatatctctggtttttgaattttaccaaaagtaacttcacaggtgttctgaaaaaggaaaattcaaggtggtttctggaggggaagagaatcaacaaatggtaaagctcacccaaataccaaacaagaaagtactcattccctaagctgagaatggaaccctgaacctgggccaccattaatgatggtggagacaagagaaagtactatcatgtggtcacaaggtcaagcgtccaaggacatgactgagcactttgctgggccatcctgaacagcagccttaaagggtcctaggcctgcattctatcctaaggaacccctcttaatgacagaaccatacagaaagacaaatttatagcacagagtacaacagatttgttacagcttaagactaacctcacaaatgcatctccaaattaattagaactttacataggagataaacagtaattttttttaccattcattccatcagtttacatagagaggctagaattctggtaagaaatttgtacccttttgccagcatgccaggcttctgggcttcctttccctgggttgccctagtgacgtggctggctgcaccacagccctgggggccaagccacaatacaaaggaaaattatctttttctattctggccatagcaaaatatgtgtgacaacacagacattagctactctccttagcaaccaatatcaaatgcaactcttaaacttggccccagttgggccctgtcatcattaattcaacctctgatcaggagtttcaacttgaggcctctgggcaagatggttactctgggaatagaaaagataagaaagggaaaagagagaaaaagcattgcctgtggcaggttggggaaggcaaagagctcagggggccagagaaagacctacccattgcagtgataataaaaagttgaggtggctgcttcttggtaggaaagattttttccagcagtcccattagcacttaagttttcctttttggagaagaaaaatatccctatgtcccatggtcctgtagatgcctaattctgtcacccatagccatcagcaaagagtgcaagacagattaatccaaagagaatagcaatgaatatcccgtagtgtcaaaccagttcttgctgagatggattttactgagaggtttacccaggtatatgcaccccactcacccaaagtcagccagttggtgcacacagatgattttcctttgggtcagagtacagtccctttgtggttgccagaaagatgttactggaaagaagttctgttccagaccccaagagagggttcttggatctcgctcaagaaagacttcagggcaagtccataaagtgaaagcaagttaattaagaaagtaaagcaataaaagagtgactactccataggcagagcagtcctgagggctgatggttgcacatttttatggttatttcttgattatatgctaaacaaggggtggaatatttatgcctctcctttttttttttttttttttttttttttttttgagacagggtcgcgctgttttgccaggctggagtgcagtggcatgatctcagctcactgcaacctccgcctcccgggttcaagcaattctcctgcctcagccaccgaagtagctgggactacatgcacatgccaccatgcccagctaatttttgtgtttttagtaggacggggtttcaccatgttggccaggatggtctcaatctgttgacctcgtgatccacccacctcagcctcccgaagtgctgagattacaggcatgagccaccacatctggcctatgcctctccttcttaaactgctataagataacttccagatgttgccatggcatttataaactatcatagcactggtgggagtatagcagagaggatgaccataggtcactctcatcaccatgttaattttggtgggttttatccagcttctaatactgcaaactgtgttatcagccaggtctttgtgacctgtatcttatgctgaccttctatctcaccttgtgagttagaatgcctaaccatcttggaatgcagcccagtgggtctcagccttatttttactcaggctctattccaaatggagttgctctggttcaatacgcctctgacagaatctgtgtctggctatgtgataaataagaaaagagagcaccatctaagtcataatgggaagggtgtttctttccataaactatttctagagaacacaaaggatgaaggattttattaatcacagctatttacccagattatgtttgtgattcatcattccccacctcttttctttgtcatgtacatttcttccatttgacttttcctgggttgtactttttataataaactagtaaacataactacagtgttttgctgagttctgtgagtagcttgatctaattattgaacttgaggaagtttgtaggagtccccagtttttaaacagtagctcagaagcatagataggcctatgcggtttgtgactggcatctacaatgagggcaatgttgtgagactaagccctgaatcagggtctgtgctgactctgggtggtgtcagaattcaaatgttagacattgagttgctgttggagaattgcttggtattaagctaactctacagatttggtgccagaagaaagatatcacagaggcctgtcctggaataaaactcttggtatctggaaatgggaggctctgctctcctgtacacaggctttcacactgcccattgtcctgggatcccaggcctcctcccagggtgagagaggatgaaaacttagaggaaaggagctctgatgacagacccccttttcccacagctgccaccacaggattcccacccactcccaaacatgcccactagacattgacatgtgcacaccactcccaggactaggcaccaccctcaggaatttcaccacagcattgttgattttagtgtttcttgacaaaaagccacaaaagtgtcaagtctcctggcatatcccaacccccagacagtgaatctgcagcagcaaactattttccccagcaacctagagttctgggcctcctgttcctaatctcatttaactgcatgggcacagaaataaatcagagtccagccccacctgggccactatctgtaaaacaaaaactccgtccacttacattgcattcttccccacgcatggattttttttttctttcaacttttctttttggttcagggatccatgtgcagctttgttatatacgtaaaattgtgtcatggggttttggtgtagattattttgtcactgaggtactaagcataacaccaaacaggtacattttctgtttcttttgttctttcattgtctattctcaactaggcctcagtgtctgtcgttctcctctttgtgtccatgtgttcttattatttagctcttatcaatgagaacatgcatttggttttctgtttctgttttaggttcctaaggataatggtctccagtgtcgtctatgttgctgcaaataacttaaactttttttttttttttttttttgagacagagtctcgctctgtcagccaggctggagtgcagtggtgcgatctcggctcactgcaagctccgcctcccgggttcatgccattctcctgcctcagcctcccgagtagctgggactacaggtgtctgccaccacgcctagctaattttttgtatttttagtagagaatttttagtgttagccaggatgatctcaatctcctgaccttgtgatccacctgcctcggcctcccaaagtgctgggattacaggcgtgagccaccatacctggccttgcaaataacttaatcttgtttttgtttaatttatttattttttgagatggagttttcactcttgttgcccaggctggagtgtgatggcgccacctcagctcaccacaacctccgcctcctgggttcaagcaattttcttgcctcagcctcccgagtagctgggattacaggcatgcgccaccactcatggctaattttatatttttagtagagatggggtttcaccatgttgcccaggctggtctcaaactcctgaccgcaggtgatccgcccgcctcagcctcccaaaatgctgggattacaggctgagccaccacgcccagcttgtttttttttgtttttgtttttttgtttttttattggccacataatcttccatcatgtttacataccatactttgtttttattaaatcttctattttatttaattaattaattttatttggagacagtgtttcactctgttgcaaaggctgaagtgcagtggtgcaatcttggctcacttcagcctcaaccttccaggctcaaggcaccctcttcagccccctaagtaactgggactacaagcatgcaccaccatacccagttaacttctttttctatcgtttgtagagatggggttttgtcatgttgcccaggctggtcttgaactgttgagctaaggtaatccacctgcctcggcctcccaaagtgccgggattacaagtgtgaaccacctcacctgaccataccttattattttaatctagtctacattaataggcaattagatttgttccatgtttttgttttttgtttgtttgagacggagtctcactctgttgcccagaccagagtgcagtggcaccatctcagctcactgcaacctctgtctcctgggttcaaacgattctcctgcctcagtttcctatgtagctgggactacaggcacatgtaaccacacctggctaaattttgtatttttagtagagatggtgttttgccatattggctaggctagcctcgaactcctgacctcaggtgatccaccagcctcagcctcccaaagtgctgggattactggcatgagccactgagcccagcccatgtctttgttattgcaaacagtgttgtaataaacatgcatatgcatgtgtctttatggtagaatagtttatatttctttggatatatactcaatttggaggttgctgggtcaaacagtaattctgttttcagttctgtgaggaatcaccacactgcttttcacaatggttgaactaatttaccctcccaccagcagtgtataaacattccattttctctgcaaccttaccagcatgttactgactttggtttttgagacagtctcactctgtcacccaggctggagtacagtggtgtgatctcagctcattgcaacctccacctccttgattcaatagattctcatgccttagtttctggagtagctggaactacagatgtgtgccaccaagcctgactaatttttgtatttttagtaaagataggatttctccatattggccaggctgctctcaaactcatgacctcaagtgatctgcctgccttgacctcccaaagtgctggggttaccgcacccagcctgttactttctaacaacagccattctgaatggtgtgagatggtgtctcattgtggtttttgttagtttgtttttggcatttctgtagtgattagtggtgagcattttttgcacatgcttgttagccacatgtttgtcttcttttgaaaagcatctgttcatgtttttttgcctactttttaatgaagtttttttttctgtaaacctgcctaacttctttatgaattctgggtattaaacctttgtcaggaacatagtttgcaaatatttttgtttatttggtatgttgtctgtttactccattgatagtttcctttgctatgaagaagctctttaattaggtccctgttgggaaaaagctgggtgttgggagggaaactgaggcaggccttgcataatgtcctctggaatgtgtctagacctgctggctccttgcttctagctttcctaggttcctattcccattatctcaagtagcagaacatgttccttataatgctaaaccatcacagctgtagatcatgcgcctgctcttttgacctccacgttctcaccacctgtttctttgttggattatcagtaaataccgtgggctcccagagctcagggccttcacagcctccataatggtgatggccccctggtgttccatcttttattttttttttgagacagagtctcgctctgtcacccaggctggagtgcagtggtgtgatctcagctcactgcaagctccgtgtcccgggttcacgccattctcctgcctcagcctcccgagtagctgggactacaggcgcccgccacgacacccagctaattttttttttgtatttttagtagagatggggcttcactgtggtctcgatctcctgacctcatgatccgcccgcctcagcctcccaaagtgctgggattacaggcgtgagccaccgcgcctagcctggtgtcccacctttatatctcaaactgtcttttttctcaatcctttgactccaccggactttgtcacccccacgacctgatgttgggtctgatcaccccaagaggtcccatttgtcaatttttgcttttgttgcagttgcttttggtatcttcatcatgatacatgtagatacgtgtggtaagacagtgaaactccagggcctcatatgactctatggtgaggccagaatcaagtatgaaggcttcaagatacattcctgagagttaagtgccacatttgcactaaagggtggcttcaggacctgttctgtttgggtttggtagggacagggcagtggcccatattttcatattttcattactgtagtagaaattgttggtgtctgtggcaggggagggcacctgtggacggtaaaagaggaacatatatttttatttccgtggagcaactcattgttcctgaatctcttctgttataaaggagaaagatgagtggactttttggtcttggtccttctgtctgtgagtgtgaggctagtaggtaagcaggtggtgctgatgcctttaagggacttgtctcaagatgcaggtgttacttgtccagagaattttatctgaaaaggatttctagaggaggagaaagaggaaaaatgcttcttttcagctaaacatatctcagatcaagagctgtgtccactctgcctcctggagtgccatgagtttagtacttgcaaacctttacttctctacttctgttttccctccccaatgattttgtttcacatacttttaaaaattcttgtgatagtcaaggatctctaaaaaatatttctatcctatgtacgagagccttctctacatcatggcttcttatatgcaatgcagaattcctaccatgaatttatgatctgccatattaaaagtgttccttttgtggctgctgaacatgggaagatgtggatactcaagattcctattgggggaaagctggggtccttagtaaagatggagaacatataatgttgaggtgtcgcttgtgttctccattagctctatgcagaacaggattaagaatatgcttatttaaacaggatggcatttatttatttatttatttatttttattgtttgagacagagtctcgctctgttgcccaggctagagtgcagtggcgcaatctcagctcactgcaagctccgcctcctgggttcatgcttttctcctgcttcaacctcccaagtagctgggactacaggcgcccaccaccacacccggctaattttttgtatttttaatagagacggggtttcactgtgttagccaggatggtcttgatctcctgacatcatgatccgcctgcctcagcctcccaaagtgctgggattacaggtgtgagccaccacgcccggcctgttcaggatagcatttattacccaggaagttctggagaaaattattcagagatacctgctttctaggatgctaaagaaaggactacttaaaatcattactaaaaattatagaacatgggagatatcttgaccttcgcatgaaactgattttttctttatggttaaattcagtctataattgactttttgaggggcaatatctcagcagtgatgttgtgttcttctttgtgcatcagcacatcataaaaatttattctagtgttgttgatgttaataatttgcttggttaaagagctctctgactttttttcactatagagttaattgtttttctctttattgttaagtatctttatgtagctaataaactatcacatttaatctggcacctgcccttttttcttaggtttttttgtttgttttttgcacatatgtgtctttggaaaatgaaggctcttatctttgtttacagaccaaaaaagttgggaaaaacacaatctctttcacttactgaatgtctgacaaaatagtcttctggggtcaaaaacattggcattgctagtaaccttgttagaattttaaaaactcagactttattccagatcttctggggaaaaaaaaaaaaagcttcacaacaggatctccagtttattgtacatatttaaatttgagaggtaccatctaactcaacatgtctttttttgtctgaaaaatatacacaactcattatgatgtaaatatagcactcaaaaatgtatacgtttgtgtccttaattatattctttatcatccagaaaagtattatatatgcactggtgttgtggatcttatgccattctctgccctcagagtaatacattagagaatatttctgtgttaaaaattattggataatttcagttattcttataagtcaaccaattctctttactctctcatttcaccttaattcaaataataaattctgcccatggccacttggtaaatatacgtgtgtctgtgcgtatgtgtttttcaggagacgttgacatttagggatgtggccatagaattctctctggaggagtgggaatgcctgaaccctgctcagcagaatttatatatgaatgtgatgttagagaactacaaaaacctggtcttcttgggtgagaataactttaatacataagtcttaatataccctaaacgttttatgtctctttttttgtagaattttctttggtaatttatgctttgtataaatgagtttctgatcccagttttcaagaaaatcttgatgatttgtctctgtagaaaagaatttcttcaacatgtttcatcctgacctgaactttccacattcctgagctgatctgcatccttcactctagattagtggtaattccagaaatttggtggcataaaatattgcccgtatcttaaaatctattttccactgtcaatttttgattcatgagtaccaggtagtgaaattaaggacctacaaatttaaaatattttctaaatagttagagatgtgtctcattaattagtattttaggattaattttctaaaatattctattatatcctttttactgagcacagtactaggttggtaactagagaatataagcaagatttatgctatttacttttaataaagcaggtattgctgtctctaagcaagacccgatcaccagtctagagcaagaaaaagagccctggaatatgaagatatgtgagatggtggatgaatccccaggtaggtgagagtgaacacaacagatgacacagatgagaggtacaaaggtaaaaaaaaaaaaaaagcaagccggcccttacaatgtgatttgggaagctgttttgcaaagtatatagtttctgggaagactgaatattttcttaaaattttctctcactaaagggcatcttctgtcttatgcttttaaattctctaagaattttccttttccttgggtgaacacacaaatatctgcataattttgaaaaacactgtttttttttgttttgttttgttttgttttttgagacagagtttcgctttggttgcccaggctggattgcagtagcgtgatctcaactcactgcaacctgtgccttttgggttcgacgattttcctgcctcagtctcctgggtagctgagattacaggcgcctgccaccacacccagctaattgttttgtatttttagtagagacgggtttttaccatgttggccaggctggtcttgtactcctgtcctcaagtgatctgcgcacctaggcctcccaaagtgctgggattacaagtgtgagccaccgtgcccagctggaaaactctatgttacattattttttagttctctttttgcatcctgtctgaaatatgtgagagtagtggtttctgttccattaggggtttcttgttaatttttctgcatagtccatcctgtttttattactatagtcttaaaatatagtttgaaattataaattatgatgtcctgtccctctgctttgttcttttttttctcaagaatgctttggctatttgaagtttattgtagtttcttgtaaattttagaatcgtattttctattgtgaaaaaaatgccactggaattttattaggaagtttattgaatgtgtagatgactttagataatatggcactttaacaatatttattctttcaatccatagacatgaaattttgtgttgttgttgagacagagtctcgctctgtcacccaggctggagtgcagtggtgcaatctcagctcactgcaacctccactttccgagttcaagtgattctcctgcctcagcctccctaatagctgggattacaggcatgtgccaccatgcccggctaatttttgtatttttggtagagacggggtttcaccttgttgtccaggctggtctcgatctcctgaccttgtgatccgcccaccttggcctcccaaagtgctgggattacaggcatgagtcaccatgcccagccgacataaaatatttttaaatttatttttgtcttctctaatttctttcattgatatcttatatatttcattgtaaagattttttaccttggccagccgcagtgtctcacacctgtaatcccagctctttgggaggccagggaggtggatcccctcaggtcaggagttcgagatcagcctgaccaacatggagaaaccccgtctctactaaaaatacaaaagtggctggccatattacaggcatagattacatgcctgtaatcccagctactcaggaggctaaggcaggagaatcgcttcaacccaggaggcagaggttgtggtgagccaagatggcaccattgcactccagcctgggcagcatgagcaaaactccatctcaataaaacaaaaagattttttaccttcttggttaaattggttttcagaaatttattattttaatactattataaataagattgttttctttattgcatcagatagtttaagtgtatggaagcataacgtatgttaattttatattttgctaatttactgactgtatttattagtttagacaattttgttgttgttcaagacagagtctcactgtgtcacccaggctggagtgcaatggcgcgatcttagctcactgcaacctccacctcctgggttcaaatgattctcccgtagcctctcaagtagctgggactacaggcgcccaccactacacctggctaattttttttgtagttttagtagagacagggtttcactatgttggccaggctgttcttgaagtcctgacctcgtgatttgcccgcctcggcccccaaaagtgctgggattacaggtgtgagccaccaagcccggctttttagacaaattttaatgtactgtttatggttttttatataataagatcatactatccacaaaaagcaactttttacttatttctcttcaattccaatggctttttaaaaatgtttttgactaatccttgtgccatacactttcagtgcttcattaaaatagaagcattgacaatgggcacaatatagttttatattgatatctgtgaatttgaaggagcaaacaactccttaagcttttgttatctggtttcaggaggtaaagatctttttctgttgtgtccctagggtgatgggatgccctctgggtttgtagtgaagaggggttgtagcttggtcacaagactgctcagtctgcactagcatccacctttagatggtttgttaccaagggcttgggtaatcataatttccattttatttttggacagattattctttaagactttgatctgtagggcagacacgagggcagtgtctgcagttggctccatatataatggcccttatatcaggatgtgaatgggtttgcctttcactgagtaccagagaggatttcctcaggtcactgtgtgagtttctacttaagcaaaactggtcatgaactgtggctcagagagctggaactgagtcattaaactacttcagggactacagtaaaaaccaaggcctgtaggcctgtctgcatggctgcaaatgggtgtcttcctccaggtctctgaaagggcaggacctctcttagactgtaactgggaggagtttgggatggttacagagttaacttcagaattctctgttggaccaagttgcgtgggccatttcttggtctgtagccaaaaccaggggtcctgtagtttctcacatgaataagtgcctgtcctctgaaaaaaacactcctcaatcttgggctttagcagagtttcacaactccctccctgggtctcaaagctcttctaaaggcacttacttgggagatgggatcttgtttatcatccgggctggtctggaaatcctggcctgcagcaattctccaacctcagtgtaccatgtagcagtcattacagatgtgagccatgatacctggctgtctcataaaggcatttttttgtcagggatgactgaaaaacttttttgctgtggtgaggataatcaaatagagcaccttttattttttcatgtcactgatgttactgtttctatacatttttactttctattttccatttcaaacttgtctgtaattttagatttggacatttaggacaatatgctagaatttacatgttatgcctgaaataaattagataattgataggcactccatattactagaatggttacttaaatttaagtttgctgcaggtaaaaaggaattataggattttcacccactttcttcagcatatatctaaatgataatttacttgtaaatatttgttttacatatcagaggctctaaccctattttgaaaaatataagttttaatttagcaatgtaatgctgttctttgcttaagttggattacagcagtttcattttgtgtaagaatagcatatatttaaaacataaaaattatcacatttcttttacatgcttattaaaagtttctcattagtatgttctatttataattatactgcatattctgtgaaattttactgccacatagtgcatgccaattattcgaaatacctgccttccatgagtacacaaatattgtagttatccagacaattcttttttaaaggtatattaatgttgcataccagattttatgagtaaacatgtctcttactgttgtgcagttttcatgttagtgttttttcagtgtaggtttcttaacatcagcttattgtgttttttagtttttcttatataattttagccaatttgcagttctgtttgtatactttaagtcaatgtgatgtttaattaagagataaatcagccatacatctatcacaatcggattatatatgtgtgtgtgtttatctataaatatgaccccaatattggttatggcttatcttgtatactttcttagctgattttcagtgggtattttatcttgtctaagcgagtagtcatggaaatactttcattatgtcttattatctccatgtgtctaatgatgaatatatatttcctttgtgtgagagaaacactttttgtgatttgaaggtaatttttgagaagatttgtaatttagtattttttccatttttcctttagaaaaagtaattgttgtaaaaacacataacaggcctggctcggtggctcacgcctgtaatcccagcactttggaggctgaggcaggcagctcacttgagatcaggagttccagaccagcctggtcaacatggtgaaaccctgtctctactaaaaatacaaaaattagctggacatggtggcctacgcctgttgttcgggctacacaggagactgaggcaggagagtcgcttaaacccaggaggcagaggttgcagtgagccgagatcacgccactgcactccagcctgggtgacagagcgagattatgtctcaaaaaaatgagaagaaaaaacagtaaaaacatattaaaatttagcatcttaagtctatttaagtgcacatttcagggccagacgtggtggctcacatctgtaatccctggattttgggaggccaagacaggagtatcatttgagcccagcctgggcaacattcggagattccctctctacaaaaattttttaaaatatccaggcatgttagtgtgcacctgtggtcccagctatttgggagattgaggggaggattacttgagcctgggagtttgaggctgaagtgaggcataattttgccactgcacttcagcttgagtgacagagtgagaccctgtctcaaaaagaagctgtacatttcagtcatgttaaatatattcacattgttatgcaaaagacttctagaaattttacatcttgtgaaactaaaactcagtacccatttaagtaacaagaacccattttaccctctccgcggcccttgacaaacaccgttccactttgtttttatgagtgtgactgcttaagatatctcatatacatagtggaatcatacagtttttatcattttgttatgggcttatttcccatgacataatattttcaaagtttatcttaaaatgtgacaagatttctttgattatatttgatttaattatgataatatttgataatctttgatttctgtgatattggatgtatatgttacattttttatgtgtttgtaaattaagagacaactgggttgcttctgccttttggcttttgtgaatactggtacaataaacatggatgttcgaatttgtgttccaggccctgtgcttcatattttggaaatatattcataagtgagattgctgtatttgatgataattccatttttaattaagaagcatttataacatttaaaataatggttgcatcttgttttctaccaacagtcaacatagttttattttcattgcatcatcaacagatttggtgttttaaaaaaaggtatagtggccattgtaatgagtgtgaggcaattttgttttttcattttatttatttatatatttatttatttatttatttattgtgatgaagtcttactgttatcacccaggctggagtacaatggtgcaatggctcactgcaacctccgcctcctggattccaacaattctcctgcctcagcctcccgagtagctgagattacaggtacctgccatcatgcctggctagtttttgtatttttagtagaaacgggggttttcaccatgttggccaggctggtcttgaactcctaacttcaggtgatcctacctgactcggcctcccaaagtgctgggattacagtcgtgaggtgagcgcccggcctcatttttatttttatatgtttctctgcaaatcattaattctgcttttcttttcaaatgttttatcccatttgggtatattttttgatgaaaattattttttcatttctttcttttttttttttttttgagacggagtctcactctgtctcccagactggggtgcaatcgtgtgatcttggctcactgcaaactctgcctcctgggtttaagtgattctcctgcctcagcctgcctcagccttctcagtagctataggtgcctaccaccatgcctggctgacttttgtatttttagtagagtttcaccatcttggtcaggccagtcttgaactcctgaccttgtgattcacccgcctcggcctctcaaagtgctgggattacctgcgtgagccaccgggcctggccttactttttcatttctaaataaagttattcaactttattgttcagttttaagagttgttcatatactctgaatattaactactttcacttgtgagttccatatattttcacccacttcctagatgacattttcagtctattgaattttttttaatgtgcagaaattctgaagtatagtgtagttaaatatttctgttctttcctttgttgcatatgcatttaatgtcgtatcttaggaaatggtgccaagacccatgtcaagttttttttctaagagattcgctagttttttgtttttttgtttttctgttttttctttttatgtctaagcattttatttgaaatattttttggccaggcgcagtggctcatgcctataatctcagcactttgggagatggaggcgggtgaatcacttgaggtcaggagttggagaccagcctggccaacatggtaaaaccccgtctccactaaaaatacaaaaattagccgggcgtgctagtgcatgcctgtagtcccagctactcgggaggctgaggcaggagaattgtttgaacccggaaggtgtaagttgcagtgagccgagatcatgccactgcactccagccttggtgacagaatgagactccatctcaaaaaaaataaataggccaggcgcggtggcatatgcctgtaattccagcatgttgggaggctaaggcgggagggtcacgtgagggtcaggaggttgagaccagcgtggccaacatatagtgaaaccccatctctactaaaaaatacaaaacttagctggacattgtggcatgtgcctgtagtcccacctacttgggaacctgaggcaggagaatcacttgaatctgggaggcagagatttcagtgagccgaggtcgcaccactgcactccagtctgggcaatagagtgagactccgtcactccaaaaataaataaataaataaaataaaatcgggccgggcacggtggctcacgcttgtaatcccagcactttgggaggccgaggcgggcggatcacgaggtcgggagttcgagaccagcctgaccaacatggtgagacccccatctctactaaaaatacaaaaattagctgggcgtggtggcaggcgcctgtaatcccagctactcaggaggctgagtcaggagaatcacttgaacctgggaggcggatgttgtagtgagccgagatcgtgccactgcactccagcctgggtgacagagcaagactccgtctcaaaaaaaaaaaaaaaacaaatattttttgtatatggttcaaggaaatgattcaactttatcagtgttgttatccagtttatggcattattttttgaaaagattatctcttctctgttgtgtgctcgtggcaaccttgtggaagatcatgtaatcatatacagaaggcttcatttctgggctctccactcttttctttcatctgtttatctgcctttgtgtcagtaccatactgtttttgttattttagcttatttatgtatgtatgtatgtatgttttgagatggagtctagctctgtcaccaggctggagtgcagtggtgcgatctcggctcactgcacctctgcctcccgggttcaagcgattatcctgcctccagctcctaagtggctgggattacaggcacacgctgccacaccccgctaatttttgtattcttagtagagacaggatttcgccatgttggcaaggatggtctcgatcccctgacctcgtgatccacccacctcagcctcccaaagtgctgggcttacagacatgagccacggtacctggcttattttagcttttaatatgttttaaaatttggaagtataatacctctttgttctttttcctgggcgtttggctggttatagttccaaatcaaatttttaaattttagacaagttttctttctttttttttttgagacggaatttcgctcttgttgcccaggctggagtacaatggcgcaatcttggcttaccgcaacctccgcctcccgggttcaagcaattctcctgcctcagcctccggagtagctgggattacaggcatgtgccaccacgcctggctaattttgtatgtttagtagagatggggtttctccatgtaggtcaggctggtcttgaactcctgacctcaggtgatccgcccaccttggcctcccaaaatgctgggattgcaggtgtaagccaccacacccagccatagacaagatttctataatgaaactgtacttttgggatttttaaagagcttatattgaatttgtttcccactgtagtttgtactgacatcttaacaaaattaattttattgaccattgaacaaaaatacgttgaagagtgtcttttatttttattttatttgttttagagacagggttttcttacgttgtccatgctagttttgaacctctgagctcaagcaatcttcctgcccagccttcctaaatgctagtattggaggcatgagccaccgtactcaacccatgtgttttatttttagatattcttggatttgccagttttactttttaatttctagttttattcagttttggtcagaaaacaaagtgtatgattttggtcttcttatttattgtcgttttgagacaggatcatatttatcacccatgctggagtacattgacataaatttgactcactgcaacctcagcctccttgactcaagcgatctttccacctcagcctcctatgtagctgagactacagacatgcactaccatgcctcgctaatttttttggttatttgtagtaatgggtctcactagacagggtctcactgtgttactcaggctggtgtcaatcttctgatcccaagtgatcctcccaccttcatcttccaaattattgggattgtaggtaccaaccacacatccagccagtatttaataagacttgttatgtgtcctaacagaatacatcaggtgcaaataagaacattgtgttgtttcttgcttttaactgaaaagttttgtacctatctgttaagcctagttggtctgtggtatggtttggatgtctatgtcctgcaaacctcatgctgcagtgtaatcctcaatgttagatgtgaaacctggtgggaggtgtttgggtcatggggacaaattcttcatgaatgcctttgtgctatcctggtcatgagaaagttttcactccattaattcaaatgagaactggttcatttaaagaaactgactccttcacctcacgcttgccgtctcttaccatgtgatatgtccagttactctttgtcttccaccatgattgtaagtttcctgagaccctcaccagaagcagatgctgttacacccttcttgtacagtctgctgagctgtgagccaaataaaccttctttctttataagttatacactcaggtattcctctttatgcaaaatagttaatacagtctataatgtctgttttctgttttcttattgatcttttatctgaattttctatttattattgcaaatgatgtcttgatctctacaattatgttgctatgtatttcttgcttcacctttgccaaaatttgctttgtatattttggaaacctcatgttatatatacagacacatatacatataaatagatatgatagttatagattcctggtaaattgacccatttgaccattatgtaatactgtgtttgtcctatgctagtacttgacttaaaatacatccaatataattattaccacctcatccaattgtggttactatttgcatggaatatagttttttttccattctgttactttcaacctatttgacttaatgctaaaatgagtctcttatagacagcaaattgtatgctttttaacttaagccactaagccatcttattttttctttttataaatttatttatttttgagataaagtctcactctgtcaaccaggctggtttgcagtggcatgatcatgactcactgcagcctcaacctcccaaactcagatgatctcatttcagcttcttgagtagctgggttgcaaatatttgccatcccaagcccagatagttttttgtacctttttctgtagatacaattttttgccctgttgtctaggttggtctcaaactcctgagttaaagtgatcagattcctcaacctccaaaagttctgagattacattttttaaataagtagtttaattaatttatatttaaaatgactgcttaaagatataaagttactattaccagtttcattgttgttttttttttaatttaatttaatgtaatttaattttatttcaggatacatgtgcaggatgtgcaggtttgttacataagtaaacgtgtgccatggtggtttgctgcacttattaacccctcacctcggtgataagccctgcatgcattagctatttatcctgattctctccctcccctgcaacaggccccagtgtgtgttgtttccccccatatgtcatgtgttcttattgttcagtttccacttataagtgagaacatgtcgtgtttggttttctgttcctgtgttagtttgctgaaaataatggcttccagctccatctctgtctttgcaaagtacatgatgttgttccttttttatggctgcatagtagtctatggtgcatacgtaccacgttttctttatccagtctgtcacagatgggcatttgggttgatgccatgtctttgctattgtgaattgtgctgcagtgaagatacacatccatgtatctttacagtagaatgatttatattcctttggtatatacccagtataatgggatcgttgggtccaatagtatatctggttctaggtctttgaggaatcgccatactggctttcacaatggttgaactaatttacattcccaccaaaagtataaaagcatttctatttctccatagcctcaccaacatctgttgtttcttggctttttagtaatcaccattttgatggcatgaaatggtatctcattgtagttttgatttgcatttgtttaatgatcactgatgttgagctttttttcatgttttattggccacataaatgtcttcttttgaggcgtgtttcttcttgttctttgcttactttttaatgaggttgtttgttttattcttgtaaatttgtttaagttctttgtagactctggatattagcttttgtcagatggatagattgcaaaaatgttctcccattctgtagattgtctgttcactctgacaatttattttgctgtgcagaagctctttaattagataccatttgtcaatgtttgcttttgttgcaattgcttttgacgctttcctcatgaaatctttgcccatgcctatgtcctgaatggtattgcctaaattttattttagggttcttgtagttttgggtttcaaatttaagttttcaattcatcttgagttaatttttgtataagtgtaagaaagggggtccagtttcagttttctgcctatggctagctagttctcccagcaccatttattaaaagggaatccttttcccatttcttgtttttgtcaggtttttcaaagatcagatggttgtagatatgcagtcttagatttctgagttctctattctgttccattggtctatgtgtctgtttttataacagtaccaggcagctttggttactatagccttctagtatagtttgaagttggatatcatgatgcctccagctttgttctttttgcttaggattctcttggctatatggggtcttttggggtttcatatgaattttaaaatagtttttttctaattctgtgaagaatatcagtagtagtttagtcagaatagcatggaatctataaattactttgagcagtatggccatttttacaatattgattctttctgtctttttgtttgtgtcctctctgattttcttgtgcagcggtttgtagttctccttgaagaggtctatcacttcccttgttagctgtattccttggtactttattctctttgtagcagttgtgaatgggagtttattcatgatttggctgtctgcttgtttatggttggtgtattgaaatgcttgtgatttttgcacattgattttgtatcctgagactttgctgaagttgcttattagatgaagaagcttttgggctgagacaatggggctttctagatctaggatcatgctgtctgcaaacatgtcgtctgcaagcttctgcagacagaagtttgacttcctaattgaatactgcttatttatttctcttgcctgatttcgctggctggaacttccaatactatgttaaataggagtggtgagagggcatccttgtctagtgctagttttcaaggggaatgcttccagtttttgcccttttagtatgatattggctgtgagtttgtcatagatagttcttactattttgatgtatgttccatgaatacctagtttattgagagtttttaacatgaagggatgttgaatttgatcgaaggccttttctgcatctattgagataatcgtgtggtttttgtctttaaatctgtttatgtgatgaattatgtttatcgagttttgtatgttgaactagccttgcatcccaggaataaagctgacttgattgtggtggataagctttttaatgtgttgctagattcagtttgcaagtattttattgagaatgtttgtattaatgtttatcagggatattggcttgaaggtttttttgtttgtttgtttttgttatatctctgccaggtcttgatatcaggatgatgctggcctcatagaatgagttaaggagaggcccctccttttctatcatttggaatagtttcagaagaaatagtactctttgtacctctggtagaatttagctataaattcatctggccctggactttttatggttggtaggctattggctatttgttaccgcctcagtgtcagaacttgttataggtctattcagggattcaacttcttcctgttcagacttgaaaggatggatatgtccagcagtttatccatttcttctagattttccagtttttgtgcacagaggtgtttatagtgttttctgaaagttgtttttatttctatggggtcagtggtgatatcccctttatcattttttattgtctatttcattcatctctctttatagctagtgtctattttattaattttgtcaaaaaaacagctcctggattcattgatttttttttttgaatggtttttttgtgtctctgtgtccttcacttccagtctgaatctggttatttcttgtcttctgctagctttaaggtttgtttgctcttggttttctcgttcttttagttgtgatgttagggtgtccatttgagatctttctggctttttcatttgggtatttagtgctataaatttccccatgaacactgctttagctgtatgccagagattctggtacattgtctcttcattctcattggtttcaaatagtttttttatttctgattttttttttttttttttttttttgagacggagtctcgctctgtcgcccaggctggagtgcagtggcgcgatctcggctcactgcaatctctgcctcccagattcaagtgattctcctgcctcagcctcccaagtagctgggattaccagcacccaccaccatgctgggctaatattatgtatctttagtagacatggtgtgtttcaccatgtttgccaggcttgtctcgaactcctgacctcaggtgatctgcctacctcggcctcccaaagtgctgggattacaggtgtgagccaccatgcccagccaaagcctacagcacccggtattcccaggtggtctcccctccaagtcccagcaaggcccgaccctgcttagcttccgagattgggcacggtcagaagggtgtggctgtggatgccagcctctgatttaattttattatttagccagaagtcattcagtagcaggttgctcaatttccatgtagttgtgtggttttgagtgagtttcttactcgtgagtttttttgttttgtttttgtttgtttgtttgtttgtttgtttgagacagagtgttacactgtcacccaggctggggtgcagtggcatgttatgatttcagttcttttgcatttgctgagaagtgttttacttccaattatgttacaattttttttcttttcttttttcttcttttttttttttgagaccgagtctcgctctgtcacccaggctggagtgcaatggcacaatcttggctcactgtaacctccacctcccaggttcaagcgattctcctgtctcagcctcctgagtagctgggattacaggcacatactgccacgcctggctaattttttttgtatttttagtacagacggggtttctctgtgttccccaggctggatttgaactcttgagttcaggcaatccacccaccttggcctcccaaagtgctagggttacaagcgtgagccaccatgcccagccatatgatcaattttagagtaagtgccatgtggaacttagaagaatgtgtattgtgttgtttgtggctggagagttctgtagatatctgtcaggtccacttgacccacagctgagttcaagccttgttacttttctgtctcaatgatctgtctaatattaacagtggggtgttaaagactctcactattattatgtggaagtctaagtctctttatagttctctaagaatgtgttttatgaatctgggtgctccttgaattgatctctttaccattatgtaacgtacttctttgtcttttttgatctttgttggtttaaagtttgttttgtcagaaactgtgattgcaggctgggctcggtggctcacgcctgtaatcccagcactttgggaggccaaggtggacagatcacaaggtcaggagatcgagaccatcctagctaacacagtgaaacctcgtctactaaaaatacaaaaaattagccaggtgtggtggcgggtgcctgtagtcccagctacttgggaggctgaggcgggagaatgacatgaacccaggagatggagcttgcagtgagctgagatcgcaccactgcactcgaacctaggtgacagagcgagactccatctcaaaaaaaaaaaaaaaagaaactatgattgcaacccctgcttttttttctgcttttatttgctttgtaattttcctccattctttaatttgagcctacatttgtcttttcatgcgaagtgggtctcttgaatacagcacacaaatgggtcatgactctttatccagtttgcccttctatgtctttcaattgaggcattcagcctattacatttaaggctaatattgttatgtttgattttgattctatccaagtggtgctagctgcttattttgcagagtcgttgatgtagttgttttatagcatcattcatctttgtacttcactttgtttttgcagtggctggtaatggtttttttcttcccatatttagtgcttccttaatagctctatctagcaaggcaggcctggtggtcatgtattccttcagcatttgcttctctgaaaagaattttatttttctccagttacaaagacttagtagtgttattttattgttttatttgattcttgtatctttgttcctcattttctctttttctgtctctgtgtcttttttatacttatcttgatatgcttttacttctttcttattttgttttgtgtatctattcagatatattcttggtggtatattaggaattacataatacctctaaaagataaaacagtgtattttaatctggtaaaaaatgaacttcagctggattcataaattttttctcattatatctgccctcaaatttgtcattgatgttgctaatcatatattttatgttgtatatcattaacaaatgtttataatgatttctattcttttacctttcaaattttagagaataattaaaaatgttttttgtgccattattataatgctaagaaattccatttttgtgtatgtgcatgtttccctagaaaataatgtatttatatgataaaattattatttataaaattactttatttaatcgtattattttcagtagaagcaactgctttcagcatcttttatgtttagggcatatgaagtgccaatattttttttcagaatttggttatttttgaaggtttttttctttttattgggcaggactggtattattctcacttgatagctatttttttttaggactttggctatatcacagtttccttctggcctgcaaagcttttgttgacagttcactgactatcttataagactgtgcttgtaaatgacatgccatttttatcttgcagctccattctcttcttgtctgtggtttttgaaattgtgcttatatatgtgtttgttataaatatctttgtgtgtatcctaattgtttgttgagcttcttcattttgacaatattttttctttcagaatttttgagttatattttcttttgatattttttacctttacaatttctgttttttggatattttaaatatttttttcttatcagttttttctggttttctatagttctctgtattcctattttactcattgagtattcaatttatttttaatttttaaaattaatatatacatcttttttatggtttctttctgaaaattttataatatttttgatagaaccattttgccctattttgtattcattgtaatctttgattaaaatttagacattaaataaagctacctgacacagtttttatcttgtagctttctcctggcatagtctgaaaacaattatcttggttagagatcctggtagactctcaaacatgttcttagaatgtatcttgtctaaaattttgtgtttactttttagttaaaggagtttatttctgcttcatcttaatcagtaaccatttgctctgttttctgtctgttgtactgcagtctctctgctgctgtaacaattacctttggtctcaagacccaaactataactccaaaatataccaccatttttttcagcactttatgttacgggagaccagtttctggaaaggcccctagaagcaagtaatatagatgtatgtgccagtattttacttgtttattaaaaaagaaaccaaaagttagcaatttactttgaaaggcagtatgttatattgttgagtaggaagaactgtgttgggcaaaggtaatggacttttctttttcttctgtgtctttgcattcctgtgtactcatctgtgtactcacctggggaactttacatgcttatttataagttttccttatgtattttggtcagtatgcttttattacatttatatgtctatgaaggatttagggcctgtggtattttattatggcatcttgcttatgtagtttgtataatataggttagatttgtaaagtatgtttatcagagtctagtaagttgaataatttgttgtttgtatttctttcagctatgtgttcttcttttaccagagacctttggccagagcaagacataaaagattcttttcaacaagtgatactgagaagacatggcaaatgtgaacatgagaatttacagttaagaaaaggctccgcaaatgtggttgagtgtaaggtgtacaaaaaaggttataatgaactaaaccagtgtttgacaactacccagagcaaaatatttccatgtgataaatatataaaagtctttcataaaattttcaattcaaatagacacaagacaagacatactggagagaaacctttcaaatgtaaaaaatgtgatgaatcattttgcatgcttttacacctacatcaacataaaagaattcatattagagagaattcttaccaatgtgaagaatgtgacaaagtgtttaagcggttctcaacccttactagacacaagagagttcatactggagagaaacccttcaaatgtgaagaatgtggcaaagcttttaagcactcctcaacccttactacacataagatgattcatactggagagaaaccctacagatgtgaagaatgtggcaaagccttctaccattcttcacaccttactacacataaggtaattcatactggagagaagcccttcaaatgtgaagaatgtggtaaagcttttaaccacccttcagcccttactacacataagttcattcatgttaaagaaaaaccctacaaatgtgaagaatgtgacaaagcttttaaccgattctcataccttactaaacataagataattcattctggagagaaatcttacaaatgtgaacaatgtggcaaaggctttaactggtcttcaacccttacaaaacataaaagaattcatactggagagaaaccctacaaatgtgaagaatgtggcaaagcctttaatgtgtcttcacaccttactacacataagatgattcatactggagagaaaccctacaaatgtgaagaatgtggcaaagcctttaaccactcctcaaaacttactatacataagataattcatactggagagaaaccttacaaatgtgaagaatgtggcaaagcttttaaccaatcctcaaaccttaccaaacataagataattcatactggagagaaactctacaaatgtgaagaatgtggcaaagcttttaaccgatcctcaaaccttactacacataagagaattcacactggagagaaaccctacaaatgtgaagaatgtggcaaagctttcaaccgatcctcaaaccttactaaacataacataattcatactggagagaaatcttacaaatgtgaagaatgtggtaaagcctttaaccaatcctcaactcttactaaacataggaaaattcagcagggcatggtggctcatgcctgtaatcccaacactttgagaggactaggtgagcagatcgcgaggtcaggagttcaagaccagcctggccaacatggtaaaaccccatctctactaaaaatacaaaaatttgctgggtgtggtggcaggcgcctgtaatcccagctacttgggaggcagaggcaggagaatcatttgaacctgggaggcagaggttgcagtgagccaagatcgcgccattctactccagcctgggccacaaggcaagactctgtctcaaaaaaaaaaaaaaaaagaaaagaaaattcatactggaacgaaaccctacaattgtgaagaatgtgccagtgctttcaaccagtcctcgaacctttttaagaaaataatttatactggagagaaattctacaaatgtgaagaatatggcaaagcctttaaccagtcttcaactcttactaggcattaaaaattcatactgtacagaaaccctacgagggtgaaaaacatggcaaagcctttaacaagccctcaattcttaacagacataacataattcatactggaaagaaactctgcaaaccagaaagatctggcaatgcttttgacaacacctcaaacttttctaaccataaaagaaattatactggtgagaaatcttagaaatctgaagaatgagacaaagcctttaaatggttgtcacacttgattgtaggtaagataattcatactggagaaaacacctacatgtgtgaacaatgtggcaaaacttaaccagtgctcacaccttattgcacaggaaagcatttgtacttgagataaattatacaaatataaagactgaaaaagccattaatatatgttcatatctcaacaccagatagttcatacttaataaaagcattataagtacaattactgtcaaaagacctttcagaaaatacaagcttttgaccaggcgtggtggctcaggcctataatcccagcactttggtaggccaaggcaggtggatcatgaggtcaggagtttgagaccagcctatccaagatggtgaaaccccatctctactaaaaatacaacaattagccggttgcggtggtggtgcctgtaatcccagctactcaagaggctgaggcaggagaatcacttgaacttggggagggagaggttgcagtgagctgagattgcactctagcctgggccacagagcaagactccatctaaaaagtaaaaaaaaaagaaaatatgaactttacagtgaagaatatttattttgaagatgaatgttacaaatataaagtgggtagtagtgcctttacttgtatcacagatcttattgtagacattttttgtagaggaaaaactctgaagcactttcacactttgttcaatatcagggaatttatattgaagaaaaatcatgcaaatgtagtaaatttggaaaaacactttttcaaaaactacagcttagaaaacagagttcatactagaatatatttttgcagatgcagtaaaagttaaaaaaaatttaatccataagtaagtctgtgtaaatatcagaatttatggtagaaatacataaggcactgacaacatcagatatactaaatcagagggctgagtatagaaaattaaagttggtagaaaaattatttgtatataactttaagaggatcagaaggttttttgcagttataattacattcaaagtatactttatttcttgaaaaatattacagattttttgaaaagtgaataatgatgtcattcaactctgaaattcctgccgtttcttcattcctattggattcacatgtgaaagcatgggatcaattattgctgtatcaaagatatgaaagattctttctttgttttgttctgtttttttgagatggagttttgctctttcgtccaggctggagcacagtggcatgatctcggctcactgcaaccttcaatttccagtttcaagcgattctcctccctcagcctcctgagtagctgggattacaggcgcatatcaccacgcccagctaatttttatgtttctagtacagacaggatttcatcatgttggccaggctggtctcaaactcctcaccttgtgatccacccaccttggcctccaaaggtgctgggattacacaggcatgagccactgctcctggcaagagattcttttttattaggtgggcattatttgtgatcttttctattgaaaagtaaaaacattagaatgtaagatgcataatgaaaatgtaagtggagaggttctttggggttaacttataatattgagtggtgcatgaggttggtgttcagagtaatattctgcattatgaaaaaacatttaattttatttaaaatttagtttatcatactaattgtacttttatataagatgcagtacatttttaaaattttagattgtgtgaagttaatagtttaacatttttaacatgttaaatactattgtgcattcaatgaagcattattataccacaaactttaccctgttccaccttactgaagggtataggtaaaagatggtaacgatatactatttagtaacataatggattaacatctctagtaattttttttgccagtggctttaaaccgcaaataagttaaagaatattgtttctgtaggttaaatttttattttgtttttaatcatttaaatttaattttggtgggtacataatatgagtatatatttatgcacttatatggcatattttagtacaggaatacaatatataatagtagcatcagggttaagtgaggcatccttcacccatagcatttctcctttgttttacaaacaatccaaacctacactttttaaaaattttttgttgttgttgttcttgttgttgttgagacggagtctcgctctgtcgcccaggctggagtgtgcaatctcggctcactgcaagctccacttcccgggttcacgccattttcctgcctcagcctcccaagcagctaggactacaggcgcccaccaccatgcccggctaattttttgtatttttagtagagatggggtttcaccatgttagccaggatggtctcaatctcctgacctcgtgatctggtctcgatctcctgacctcatgatctgcctgccttgacctcccaaagtgctgggattacaggcatgagccaccgtgcccggccactttttataaattttaaaatgtacaattgttatttactatagagttatttttatggtcataatacaaattatatatgagtataaataaaattcatttctaaactattaatattttttccaaattgttatatatttttctttgaacatgtggcctgtctgcctgcaaacatgcagactttttgattcacatagagttaaatatgtattagtctaaagacaaactttaggtgtaagaaaattatggaataagtgtgtgtgtgtgagtatgagtttgtacctattttcagaaaagaacaatatgggaataaaaatcattttaataaggtggctactataaaactaaaaaccttaaaaaatgctgaaagcaaatgtatactttgtgctttgtattgaatttattactgtacaatccatgacttacagttctgaaccttttcatgcaaattctctgtatatacttgcctggtactcatgctagacccatactttttttgtttcttacattttttttgttttatggtttaggaagtattcattatatgagctggtctgtgattataagaatttttatgaaatttagtgcacacaaaataatttttagatgtaattccaaaagtagtgtattaagttacattttatttagtgagagcactccattttgttcttttaaggggagaacaatatataagttttcttttctttagtgattgttcctttcactttttataattgacataagtatatttatttattgagtcaatttgttcaggtaagtactggggggcttcataagtcatgaggatgtttttatatataaatgtagcaaacatacattacagttcttactgtgtaatcgatgctccataataattcacaaatattcctgctggagttagtttgtaatttcaagtcagaaatgaaagatatcagtggtgaagaaataagattgattcttcatatggagtggacattttttccagactataaaactgaatcttgctgaatttaaagagaaattctggccgaggcagatggatcacctgaggttaggagtttcagaccagcctggtgaaacccggtctctactaataaactacaaaaattagctgattgtggtggcatccacctgtagcccagctactcaggaggctgaggcagaagaattgcttgaacccaggaggcgaagattgtggtgagccgagattgtgccattgcactacagcctgggtgacagaatgagactcataaaaaaaaaaataaattctgcttcttttattttctacttctcttcagatttgtttctcgtatgtattttccaactatgtatgcatcacagcccttctttttctgagttatagctacagttttctgactgttctcttcacgccatttcatttcgcctggtattttgtagattttgatgacaaaattctatttttagtgcacttaaaaatggattttaactggtgagttcgcttatcaatataacattcagattagttaattaagataaaagccaggtgtggtggctcacgcctctaatcccagcactttgagaggccgaggcaagtggatcacttgagctcaggagttcgagaccagcctgaccaacatggtgaaaccccgtgtctactacaaatacaaaattagccacatgttgtggcgcatgcctgtaatcccagctactcgggaggctgatgcaggagaatcgcttgaacccaggaggcagaggttgcagtgagccgaaattgcgccattgcactccagcctggacaagagcaaaactctgtctcaaaaaaaaaaaaaaaaaaagattaaaggcgcacactgtccacaggcaagaggattaaattagcattgcatttctttgtttttaaaagaaaaatcttattagattcttatacaaagtgtggcaaatataaaacttgcttgaaaatatggaaattaaatttttaagagagttaatagtaaacgaatttaattttctttttttatttttactttttattttttagagacagagtcttgctctgtctcccaggctagagtacagtggtgtgatcttggctcactgcaagctccgccttccgggttcacgccattctcccgcctcagcctcccgagtagctgggactacaggcgcccgctaccgcacccgtctaatttttttgtatttttagtagagacgggatttcaccatgttagccaggatggtctcaatctcctgacctcgtgatccgcccgcctcgacctcccaaagtggtgggattacaggcatgagccacagtgcccggccacgaatttaattttctatgatataattacagcacaatttacatttccgtgcagaatcttttaagtgtggtggtaaagattgcaaaataataaaatgacctctgaatttaaaatttagaaaaatatgtcttttctatattgattttacaatttggagaaatttctcttattttttatattttttcttttagtgggagaagtttagtctacggtttttatttttagtcaccaagctgtagccaactcctgggtcattttctctgaaaaacatttggagatcatgacaagttttggattaaaacattctgttattttgcatgcaaactagtttactgtgttcacagactggccagtcatgggaccataagcaacacctgcccctttagtggctttcataccattaccaccagtaccagaaactccaggtggcccaagcttaaagtaaaaatcctaaagtacattggcttctcccatgcaatgtgctgggtccaaaccatgctgttaaatatcagagttcctatggttatgactgacaaatgacaataatagccccaaaatacatatttttgatactatttagccaagattaccacaaagatacagtatttgacacattcttattctataacattttgaaaatattttctcttgacagataaaaatgtgtactttttctgtagaacataatattttgaacatgctgttaaatatcagagttcctatgattatgactaaaaaattaaatgacaatagtccccaaactatgtattttcatactatttagccaaagtaatcacaaagacacagtatttgacacattgttattcttttatgtcttaaaaatattttctttcaacttgagaaaatgtgtgctttttctgtagaacatattttgaagtatatatacattgttattatttctaggtaattaatacctcacatagttaacatttttgtggtgagaccacgtcttatcatttttcaaaaatccaaatacattattatgaactatagtcaccatgttgtacaataaatctcttgaacttatttctcctatttgactataattacttattatttgacagactttccaaacccccatttcttctaaataccttggcatctgatggtcaccattttactctatacatcaatgggattaagatttttggaatccatgtataggtgaaatcatgaaatattaatctttctgtgcctggcctatcccaactaatataatgtcctccagcttaatctatgtaatttaaaataatataatttttttcttttttttttttttttttaaggccaggtgtggtgtcttacacctgtaatcccagcactgtgggaagccagggcaggtggattgcttgagcccaggagtttgagaccagcctggtcaacatggaaaatccccgtctctacaaaaaaaaaaaaaaaatctcagctgggcatgggcatggtagtgcatgcctgtaatcccagctactccagaggctgaggcatgagaatcccttgagccagggatgcagaggttgcagtgaactgagattgtgccactgcatccagcctgggtaacagagtgagactccgtctcaagagaaaaggaattttcttattttaaaaataatattctgttgtgtatatctaccacattgtcttcatttactcattagatgttaaactgtttattctgtattttggctattgtgaaaagtgctacaaacagaattgcaaatgtttcttcattctgattttatttgttttggatatatatccagtagtgcaattgctgttatgacatggtagtttaagttttttgagaaatctctattttgtttttcataatggctgtcttcatttacattccaaaccaacagtgtgcaagccttcccttttcttcacatctttaccaacgctttttctttttaataagagtcattctaacaggaacgagttgatatctcctagttttgttttttcttttttggcttgcctttttgtgataattgacattgagcatttttaaatatatcagttggccattatgtatgtattttcttgaaaaatacttatttcagctacttatttttaatagttacttatttttgttgtattgtcatttgagttttgtatatatttttgatattaaccccttgtcacatgtataatttgcaaatattttctccctttttttagttgtcacattctgttcattgtatcagattctgtgcagcagctttttaatttgaagtgatctgactgacttgttcttccttttgtgtcctgggatatttaggttaaatcaaaaaacttgctgcccagaccaatgttatggggctttcactctattttttggtagtagtagtttaagagttttaggccttacatttaagtggctaatttattttgagtttatttttacatatggtgtgagatgagggtctcacttttttttctctgcatgtggacataaagttttctaaacatcatttattgaagatactgttatttcccttaaaaaaaaaagtcacctgtatttaaaatcagttagctgtaaatacactgatatatttctgctctctttttcttctgctccattggcctatatctctgtttttattcaagtgacatactgttttggttaccacagttttgtagtgtatttcaaagtcagggtgataccttcttttgtcttgattgctttggctatttagggtgttttgtggtaacatatgaattttagatatgctttttaaaaatgtctatgaagtatgtcactggtattttgatagaggttgcattatatctgcagatcattttgtgtaatacaaatatttaactattaaaaatgccagttcatgaatgagtaatattattccatttatgtgttacttaatttgtataatgttctttagagtagaatgtaaggtgtttcaactttttggttaaatttacttcaaactatagttaggtagatggaatttttttgaatttcattttgagatagttactaatgtatagaaatgctatgactttttgatgatgtttttgtattttgaaagtttaataaattttgtttgtttattttttgttgttgttgttgtttcaaatggagtctcagtctatcgcccaggctggaatacagtggtgcattttactttgcaagcttttacaccatctcactggagtcagtttgttgttgtttttgttgcttgtcttttgggatactgtagcaggattgataagaaatcagagagactgatggggttgaggaggatatttattatttaggtgcactggcctagtcggattaacatccaaaggactgagccctgaacaaagagttaagttaccctttaagcattttgtgggatggcagggggagatctgtgcagggagaagcatattacagaagcgagaaacaaagacagttattcaattaattgtgacatgcattacataattttttactttccaaggaaaaacatgttttacaacttgagtttatctatctagtgaccttgcagctgcacagctagagaaacagggtcttcaaaatgcctgggaaaggaggagagataagccttgctagccacagaaaaacaggccgttaatttttaaaggactccagctctttctctttctcaggaggaattgggttttcttacatacaactgagtttctgcttacacattctttaatttcttttaatttctgttccaatactatttttttggtcacaaatttttcactttttttttttctttctttgaaacggatctcactctgttgcccaggctggagtgcagtggcgtgatcttggctcactgcaagctctgcctcccagattcacaccattctcctgcctcagcctcctgagtagctgggactgcaggtgcccaccaccacacctggctaattttttgtatttttagtagagactgggtttcactgtgttagccaggatggtctcaatctcctgacctcgtgctctgcctgccttggcctcccgaagtgctgggattacaggcatgagccaccgcatctggcccaatttttttactctttttcttttactatatttatttcactattcttctgcccccttacataatttctatccagggggtagaaattatgtctgtgttttcccctcattatcagcatctgattggctgaccagcaatttgtctccaagaaatgaaagctgggttaggtgaaggcaattttaacagcttttcaaagttagagtacaccagaagattcctcttagccccagggtatccacttgctccctagaaaggatacactccatacttcaggtcatcctaagggagaaaataaaccagaagctgatatccaccggacattcaagctgacataagcatggcagatatctcggtttatccccagatagtactaagcccaggaccagcaaaaaactaaagggtggctgaggacacatcaccccataaattttccaaagcagaactttgacccaaaaacattctgataagatctctgtgcctagagaagataaaacgaaaagagacacagagattttctacaatacaacatcgggggattattatttgctttctcctcatgggaaatatttacaaacagttaatacaacttcttaaaagcaccatttaatgttttaccaaaaaataattaattaaaatatgatataaaaaaagtacactaaaagacaaagaagtgataatgtgaattaggaaggaaaagttggcatttaggaatgccagaagaacctggaaatttagtatcttactgcaagccacagtgaggctggagatatggggcatgggagtttagacttaaaaaccctgcttgggacacaggtgaaaaatgcagcagaaaatcagttccccgtgctgtgtgaaaataattaagtggcaggcaattagactgaggtgtctctagtccctgggttcatactttaaaaaaaactaactcaggtgcattatttttaattactacattcagagaaacaaaattcaggcttcaccaactataaactgcccattaagctctgattacataaccaggaaattttcacctttaatctattgaagtaggaacttaagaaaataacagaataatagcataagtaataatagtaaagattatagtaatagagaaataacaatagctcatagaatgaattgctgtattaaccaaggctaacaagaatttaagtagcccccctgaagttagaagagaatattaactgtctgtcccaggaaacattaaccatatctaccttccacatattttgtaggctctgtaaactcttgtttctttcttccttgcacagctgcaaggtcacaagacagataagcataagctgcaaactaagttttcccagagatgtaagacatgttgcaaaagtgtcacagcagcctttgttctcatttctgtaagcctgcttcctgcttcacacagtgcccacctcaaaatgcttaaaggggactcattttctttgctctgggctcagagtttcaggacatgtgtccgctgtgccagtgtacaccttaaataaacactttccttcactccatttcgtctctccagttccttactttcccacaacagtacaaattaagaaaccacgtaattgtacctaaccaattactaaatttggttttcttcattatgcattttacaaaatgtcaagcgcatccaggtgaagagaccaccaaacaggatttgtgtgagcaacaagcctgtttattcacttgggtgcaagtgggctaagtccagaaagagagtcagcaaagggagataggagcggggcagctttatcgggaacaagtcataatggtagaatgtcataaggtgggttaactagttaaggcaggaactggctgttccacttctttgtgattttttggctgctccagacttcttggctcctgcaggccatctggacatatatgtgcaggtcacaggggttataatggctgagcttcagctgaggcctgacattcctgtctttttatttttaaaatataaagttataagaaaagataaagaaaatataactttttagtgagggtcattggggtaggggtgatatttctcaggactgcttcaagcatgaccagggactgcgtggacaccttaaagaaaattttattatgagttagtccagtaagtttcaggtctagggtgcattttttatgtggctaaagaggtgccagttagcatattttttagcttggaactgccctaagaaaataagttctctaaaaacagtaatcaggcatattagctttaatgtaggtggcgatgagtttttagaccaaggaaggaataatgttttatgtaccaaagctttttgtccccattttccatcatatgaataggattccctgttgttaagccaacgacctattatattactctttttccataggtgtgggtggcaatgtgaatggagaagttcaatagttgtgattgcaaatcctatgcaggagagataataagtaaaataatctttgtttcctggataaagctgaggaagaataaatttttcatgagctaagagccacttgccctgagttggaaagactggtagagcaggttttcagaagaggagtaggtgggggtgatagagtagaaagaaaaatattggccttttggagtgagggctggaatatttgtgggtgtggaggcatttgctatttcttttgctgttctgtcagcataggcatttcctttagcaataagatgagttggtttctggtgtcctttacaatgaatgaccccagccttggctggcaggagagcagccttaaggagagcctttattagagaggcattgataatgtaagagccttgtgtggtgaggaaacctctttcagcccacataacagcatggtggtgcaggatatggaaggcatatttagagccagtataaatattgacgtacagtacctttgcaagagtgagggcccaagttaaggcaatgagttcggctcgctgagagctagtggagtggtgcagagcagtagcctcaatgaaagatgtggaagagactatagcatagcctgcctttgctggtgagtagcaattaggccaagacattttaacaaaattatccactaccctgactattcctggaatacagccgcatctcattgctgcccttcttcccaactcaaagcctgttttgcttcctccccttgtatctctccaccttaatccgcaagtatgggatacctctactccctctttggcaactgaccatgcaccccttaccattccattaaaacctaatcacccttaccccactcaatgccagtatcccatcccacagcaggctttaaagggactgaagcctgttatcactcgcctgctacagcatgggcttctaaagcctacaaattctccttacaattcctctgaattacaattcagaggactatgctgagaactgccatcaataaaccaagtgtgatcagggtgaggaataggaaagatggaaatatggggaaatggagtgaatgccaggtggatcacagacatacagtcatgggggtcaggtgtggtatcaggaataatgtggaaggctggactgaagtccgggccaggaacaagggtaattatgggagactcagtaaagagcaagtatagccaaagaagccagggggcagaaagtatatgcatcaggtgtgaggaagaaaacaaattttgaatgttatgagacttgtggagagtgagttgagcatagtttgtgattttgaggacatcttgagcatagttagtgattttgaggacctctaaaagtattagagtggtggcagtcactgcacacagacatgagggccaggctaaaacagtaaggtcaaattgtttggacaaaaaggctacagggcatggtcccggtccttgtgtaagaattccgaccgcacagccctgcactttggctgtgtatagtgaaaagggttgggatgagtcagggagagccggtgtgggagcagtttttagagctgtttttaaggaatggaaagaagagtggggagaggatttgggatctatggggtcggctgtgttttcctttgtgagtttatataatggttttgttaggatggcaaacccaggtatccaaaggcgaaagtatccaaccatgcctacaaaggaaaggagttgatgctttggtggtggggataggggtctgtgagattaactgaacacagtctgtatgaagagtgcatgtatgttgacaaaggactatgctgagatatgtaacactaggggaagaaatttgaggcttagagggggatagttggtacccctttgagtagagatgttaaagaagtaggatactgttctgatgggaagcttggtaagaggagctgcaaagaagaaggtcgtcaacatattgaatgaggtgagaagcagaggggtggaaagaaactcaatcatgagaaaaggcttggctgaagtaatgagggctgtccctgaagccttgtggcagtacagcccaggtaagctgctgggactgatgggtgtcagggtcagtccaggtaaaagcaaagagaggctgggatgaggggtgcaagggaatagtgaaaagggcatctttaagatcaagaatggaatagtgagctgtggaggaaggtattgaggacaaaagagtgtacgggttgggcaccacagggtggataggcaaaacaatttgataaggcacagatcctgaactaacctgtaagactcgtccggtttttggacaagtaaaatgggggaattgtaaggagaatttgtaggctttagaagcccatgctgtagcaggcgagtgataacaggcttcagtccctttaaagcctgctgtgggatgagatactggcattgagtggggtaagggtgattaggttttaatggaatggtaaggggtgcatggtcagttgccaaagagggagtagaggtatcccatacttgcggattaaggtggagagttacaaggggaggatgcaaaacaggctttgggttgggaagaagggcagcaatgagatgcggctgtattccaggaatagtcagggtagtggataattttgttaaaatgtcttggcctaataagggaactgcgcaggtggggataactaaaaaagagtacataaaagaatgttgtccaagttggcactagagtgggggagtttaaagaggtttagaagcctggctgtcaatacccacaatagttacggaggcaagggaaacaggcccttgaaaagaacgtaatgtggagggggtagcctccatattgactaagaaggggacggacttaccctccactgtaagagttacctgaagcttggcatccatgatggtccggggggcttctgagacgattgagcagcatcagtcttgccaaggagatctgggaaggagtcagccagagagctttgagccagagctccaggggccttagaagtggctgcaatattagttggacagtttgatttccagtggggtcctgctcagatgggacatggcttaggaggaatcctgggctgtgggcagtccttggcccagtagccagttttgcggcacttgaagcaaggtccatgaggaggttttaaaggagtgcccagaggctgcggtttggttgttctgcagtttttgtgtgccaaaggcatggctggagtttgtcttacagcggaggcaagcagttgcagctctgaaagatgttgccacttggctgcctcttgtctattgttgaacaccttgcaggcaagattgattaattcttgttgtggggtttgagggccagattccaatttttgaagctttctttaatgtcaggaggtgactgggtgataaaatgcatattgagaataagatggccttctggcccttcacggtttaggggctgtaaagtgtctaagggtggccgccaaatggcccatgaactgggctgggtttttatatttgatgaaaaagagcctaaatgctaactgatttgagagaggttggataaagaaaaaaggagaattaaccttgactatgccttcagctccagtcatctctctatgaggaaattgttgggcaggttggggagggctagtcacagaatgaaactgtaagctggaccaggtgtgaggggggaggtgatagaaggattatagggtgggggagtggaggctgaggaagaattgcttggcagtggaggagcagcctggggaggagggaaaagttcagatgggtccataggaaaggaggacttaaaggacccagagcttggggtggagactgaaggtacagacaggagagaaagaagaaagatttgagatgagtcatgctgggagcagagactagggagggaccaatgtgtaaagaatgcctggacgtcaggcacttcagaccatttgcccattttttgacaaaacttatctaggtcttgtagaatggagaaatcaaaagtgtcattttctggccatttagagccattttcaagtttgtactggggccaagcagtgttgcagaagaaaataagatgctaggttttaggtcaggtaagagttgaagaggttttgagttttttagaatgcaggttaagagggaagaaggaggaatggagggcagaaggttgcccatagtaaaaaggtaagtttagagaaaagagagggtagagacacagagagagaggggtggtacttgccaccaaggtgaaggatcaaggcaggcatccccgcggtgatcaaacacatctagaatgtgggtgaataatcaggcaggcatccccacagtgattagacaccaagggaagactgtcttcccgagtctgtgaccagcactggagttttgggtccatggataaaacgcgtctcctctgtctctaccagaaagggaaaggaaatgaagggaaaggagagattgaagggtggtgccaaaattgaaaggagaaagaggttgagggatagcaagagaggttggagaagagaataaaaagatgctgcttacccgatttaaaattggtgagatgttttttgggccagtctgaggacccgagtttgtaggtggattttctcatggagcaaaaggcaggaggacaggagattcatttcccaagggaggtcccctgatccgagtcatggcaccaaatgtcaagcacatccaggtgaagagaccaccaaacaggctttgtgtgagcaacaaggctgtttattcacttgggtgcaagtgggctgagtccgaaaagagagtcagcaaagggagataggagaggggcagctctatagggcttgggtagacagtggaaagttacagttaaaagtagttatctattgttagcaggggagggggtcacaaggtgcatggtggagagatcatgggactcattgtccagaagaatcacaggacaatcacagggtcgattgatcagttaaggtggggcaaggaaaagtcacaatggttgaatgttgtaatgttggttaatcagttaaggcaggaactggctgtttcactttctttgtggttttttggctgctacagacttcttggctcctgcaggccatgtggacacatatatgcaggtcacaggggttataatggctgagcttcggctcagatgcctaacacaaaacactttccttcaagcctctcccatagactacaaactacaaaccatagctgtgtgctctacaattctaaaaccactctttaattaaattcttaaatattttggagtgactcccataaagttttaataggcaaaagtaggagctgggaaccccacagaacaaagttcttcccattcctggcactctcatcatttcaaggcttccgggggtcccagcgtcttagctgtggatctataggggaagaagacacagagcaatgaagatgagacctggaactcaagctgcagtgagagacaaaggccccaccaaacctggaagtcgccctgctggctccagctgcatgcctgattggacagttcccagcccagagtcactgattggataacttttgttttgttttgttttgttttgagacggaatctcgctctgtcattcaggctagagtgcagtggcatgatggctcactgcaacctccgcttctcaggttcaagcaattcttctccctcagcctcctgagtagctgggactgcaggcatgagccatggcgtccagcctgtataacgtttaaaaccccaccctctcaggccctgagtgacagaagatatgattaaatgatgggctgcagccctctcaggcagggcttcctccctgaggtgagcttgacccaccccagaggatatttgcattcaaccttgcgtataaggtcatacgcatttgtaaataatatatcatatggcggccaggcacggtggctcatgcctgtaatcccagcactttgggaggtcaaggtgggtggatcacgaggtcaggagttcaagaccagcctggccaacatggtgaaatcccacctctactaaaaatacaaaaattagcctggcatggtgggcagcacctgtggcgcaggtggcacatgtgggctgcaggagccaatctgctactctggaggctgaggtagagaattgcctgaacccgggaggtggaggttgcagtgagcagaaatcatgccactgcactccagcctgggcgacagagtgagactccatttcaaaaaaatatacatggctatacacaaacgaaaataacataataacacatgttttaaaatttcagctttttttggccaagcgtggtggctcatgcttgtaatccaaacactttgggaggctgaggcaggaggatcatgaggtcaggagttccagcccagcctgatcaacatggtgaaaccccgcctctactaaaaaattaactttgggaggccaaggcaggtgaatcacctgaggtcgggagtttgagaccagtctgaccaacatggagaaaccccatctctattaaaaatacaaaattagctgggtgtggtggcacatgcctgtaatcccagctactcgggaggctgaggcaggagaattgcttgaacccccgggaggtggaggttgcagtgagttgagattgtgccattgcactatagcctgggcaacaagagcaaaactccatctcaaaataaattagccaggtgtggtgacgtgcacctgtaatcctagccactcaggaggctgagccagaagaatcacttatacctgggaggcagaggttacagtgagctgagatcatgccactgtactccagcctgggtgacgaagtgggactccatctccatgaaaaaataaaaaaaaaaaaaattcagcttttttaccttcctggtttacagtcctttgagtaggcagcctgagattttaaaaaggaggtaatcctctgaaatagaatgtgagacacatgtgaattttgaattttctagtagccaaactttaaaaagaaacaaagaacgggttgaattgattgtaagaatgtagttaagccaatatatccaaaatatcattttaatgtgtgaggaatatgtaattattaatgaagtatataaatatttgcaactaaatttttgaaaataactgcatattttacctttctagcacattgcagttcagaccaagcacattccaggcacccaggagccacacatggcagctctgatgtcagtggtgtgaagggccagaggggaaggaagggcctctccctactaacatctatcttcagttccgaggttggaacagatagtggccatagaaagagctgaggccagcaggaataaaataaccacaggtaaaccactgctggccacctgttgcccaccttccttttagagatcaggcagttaacaaaggatgatggggccacaggagaaaaaaactctacgtcttcagttctgtccacactcttgaactccaatgtttagatatggagaaaatagattaaaggcatttattttgctatttggccttggccctaattgtctggctgtggttatcggttttcttgagcggtgactgcactcctgtgcactcctggagtgactgcacagaacttcaggcgatctgcctgcctcagcctcctgaagtgctgggattacaggtgtgagccaccacgcccagccaaaatcttctacatataagtgtatgccatgagtgcacacaagaggccttttttaatttctgtcatttgtagagccataagaaaaaaacagcgaacaaagagtgtatgatagcaaagatgtcttgatttttgatcttataaaaaaaaaagtctatctgggccaggtgcggtggctcatgcttgtaatcccagcactttgggaggccgaggtgggtggatcacaaggtcaggagttcgagaccagcctggccaatatggtgaaaccccgactctactaaaaatacaaaaactagctggacatggtggcacacacctgtagtcccagctactcgggaggctgaggcagaagaatcgcttgaacccgggaggtggaggttgcagtgagccaccaccacaccactgcactccagcctggatgagagagcaaggctctgtctcaaaaaaaaaaaaaaaaagctatctatatcaatgttgccatccacttttgagaagaaactttactggttagctttaccttaagatctccaatggatatacaattgcaaatgtttggaggggcccttctgagtcatgagattattaacccaaggttcaaggtcctgaagtcttgctgcagtgtggatggcaagcagactcaatctctgggttatagattataaagagttttactgtcctcagtcagtagaccattaaaagcattctttacctggtgaaaatatgctttgccataatgcactgaagttttgctgcatttaatcatattagacttcagtagcagaagatacatgaggttctattatctggtgcataagacatccaatgactattttataatagtcaacacatttttttcactctcagtgaatctgattgtcatcagtctcaattacaaaaacaatccagtccatttagttagctttgcttaacactattttatcagggctgggtgcagtggctcgctcctgtaatctcagcactttgggaggctgaggcaagtggataacctgaggtcaggaattcaagaccagcctggtaaatatggtgaaacctcgtctctactaaaaatacaaaaattagccaggcatggtggcaagcgcctgtaatcccagccacttgggaggctgaggcaggataatggctgaatccgagaggcggaggttgcagtgagtcgagatggcaccatttgatttatttatacataaatagactgtaacttattattgtaccaaccaccgtgtttttaccaataaaataacatcaagtgttcaagccatgttcaaataaggcaaatcccaagctgtggtcaatctggctgtttctacacctcatgtttattttctgtatgtccctttgctttttctgccataaatctgttttcatcatgtggctgtgctggagtccctctgaccctgttctggattcacaggctgcccaatttgcaaattattctatgctcaaataaactctgttaaatataatttctctaaagtttttttcttttaggctgggcacggtggctcacacctgtaatcccagcactttgggaggccaaggcgggtagatcacgagatcaggagttcaaggccagcctggccaacatggtgaaactccatctctacgaaaaatacaaaaaaaattagctgggcatagtggcgcgcacctgtaatcccagctactcgggagcctgaagcaggagaattgctgaacccaggaggcagaggctgcagtgagcagagattaggccactgcactccaggatgggcaaaagagcaagacttggtctcaaaaaaaaaaaaaaagtttctttctcttaaaagttttcaaatttttttatatgatgaaaaataaataatgtgttgttgggcctcgatttcctaaactcatccctcagctatttccttaaattattctatgtcttttcaaaatgcttcttcaatttcttttctttttttgagacagggtctcactctatcaaccagtcttgattgcagtggtgtaaccaatcatggctcacttcagccttcaccttccaggctcaagcaatcctcctgcctctgccatctaagtagctgggactacaggcatgcaccaccatggctggctaaattttattttattttatttttcatggaaacagcatcttattatgttgcccaggctgcactggaactcctgagctcacgtaattctcccatctcaggctaccaaagtgctaacaatacaggtgtgagccagctagtgcttctgcaatttcttgagatgattattcccaatgataaacagtactgagcacaaatctgaaggaatctggtttcttctgtacaagtgtcactctccaggatttcaagggtctagggcagggcagctactttgtagtgtgatctatggaggtacatgggctttggagtcagacagagttaatcctgagtctcagcccagccacttagtatctgtgggtctttggacaattttcttgatgtgaaagagttctatgaaccacatatggaaaagaggtagattggtactaattgcaaaatggtggcaatttttaatctcttctgtatccatgcccattgccaggtgcttttacaactgtttccatcaagatccagaatctgttttccaaaccctagatctggctggccttattggctcagagtggtagaaacttgtgaacatgacagtgggctagtttggggcccaggctcaaatggtcttgaatgcttctgtttttctttcagaatgctgccatctccctgaataaagccatgttagccagctggaaaataagataccatgggaaggagaagcaaggtgccctgttgacagccccagaactagaagctcacccccagaagcacagctggctagtcaacaagcagctgatgatacgtgtctcaaagagctcagctgagactagaagaacggccccactcagtctagcctaaatggctgaccatctcaattatgaactaataagttttggacgatttgttatgctacaatagctaactaatacatgcaccccgtgcagataggacaccaggattctatgacaggttgattactagttaccttctaacagtgggcaccctataggtactgattttttcccctgatttaaagttgggtgacttgtaagagaatgttgagtaatgcagaaatacacgtagacatgtatgcatgtgattggtgcttatacccacacagtcccacacaccacaggagaaaacagataactacggcctgaccattagggccaaggccaatagcaaaataagttttgcctttaatctgttttctccatatctaaacatttgaggtcaagagtgtggacagatctgaagacacagagttttattatcctgtggccccaacattctttcttcactgtctgatctctggaagaaaatgggcaacaggtggctatcagtggtctccttgtggttattttgttcttgctgccctctgctctttctatggccactatctgttccaccctcagaactgaagggagatgttggtagggagaggcttttccttcacctctggcagaaaaggtttgctggggcccttcacctcccgacatcagagctgcacttcaatgtggaagctttggtcatgtgtggctcctgagtgcctggaatgttcctggtctgaactgcgatgtgctagaaaggtaaaatacagagttagtttcaaagatttagtttcaaatatttatatactttattaataatcacatatttctcacacattaaaatgaaaattttttgatatattgggttaattaaattgttacaatcaattcaacctgttactttttttttttaagtttggttactagaaaatttaaaatttacatatggctcacattttatttcagaaaattacctccgttctaaaatttcagacggcctgctgaaagaccagaagccgggaaggtcataaaatccgaaattttaaaataattgttattatattcttttcatttgtgaataggcatacagtatgttatttataaatgcatgtgactttacacacaaggttaaatacaaattccctctggggtgggcctggctaagctctgggaggaagccctgcctgaaaagacggcagcctaagctgtcactctttcttcactcagcccagcatctgttcgcatcttctgtcactcagggcctgagaaggtggggttttaaacgttatccaatcagcgacgctaggctgggaaccgtccaatcaggcacgcagctggagcggacaggacggcttccgggatgtggcggggcctttgtctctcgccgcagcctgagctccaggtctccccttcgctgctctgtgtcctctgctcctagaggcccaacatctgtggccctgtgacctgcaggtattgggagacccacagctaagacaccgggaccccctgaaagcctagaaatggtgagagtgccgggtcggacatcccgagagaggggaagggctggttgtaaccggtgggaagtggctgtggcgggactcaggcctccccgcagtcagctccacagtctgcgccccgagttctccttgcccagctcggcctcagtcccctccagccataagatggcggctgtgctgacagtcgggaccccaggcgtcctgtctcttcactgcacagtgactgtgccctggcctggagccctctctgggcagctctgcacccgcagcaccgcgtctttcccagattgtgcagggaccacgggagggtcttcaggggacagttctgactcggggtgcgggttcatgaatgggaagagctttgttccgtggagttcccagttcctcttgtcttctgttaaaaatatatgggagtcactataaaaacattaaataatttaatcaaagagtgattcaaaaattgtggagcacccagctgtggtttgtaatttgtgcttcatgggcgggacttgaagaaaagacttttataaaaagcatgatgaagaaaaccaaattcagtaattggttaggtagagttacatagtttcttaatttgtacaataaaggtgaaaatttcctgattatgtaatcagaggttaattggcagtttatagttggttagggctgagttttgtttctctcaatgtagtaatttactgaaaaatgtacgtcagttagatttttttaaagtaggaacccagggactaaagacacctccgtctaattgcctgccttttaattattttcacagtccatggggagctgattttccgctgcatttttcacctgtgtcccaagcagggtcttaagtctaacccccattcctcatttctccagcctccctctggcttgcagtaagatactaaatttccagttccttctggtgtttccaaatgccagcttttcctccctaattcacgttatcgcctatttgtcttttagtgtacttttctataccgtattttaattattttttgacaaagcattaaatgacgcttttcaaaaagttttttaaaagattttttaaaaaaaatatctgtaaatatttcccatgagaagaaagcaaagaataatcccctgatactgtattgttaaaactctctgtgccttttctccttgtatcttctctaggcacagagatcttgtcagaatgtttttcggtcaaggttttcctttggaaactttatggggtgatgtgtcctcagccaccttttagtttttttctggtcgtgggtttcagtgctgtctggggatgaactaagatatccaccgtggttatgtcagctaaagtgcctagtgaatatcagcttctggtttattttcttccataggacgacttgaaatatggagtgtatcctctcaaggaagcaagtggatgccctggggctgagaggaatcttctagtttactcttattttgaaaaggtaacctcttgagacattaaaattgtctacgcccaacccagctttcatttcttggggacacattgctggtcagccagtccgatgctggcactgatgggaaaacacagaaataatgtatgccccctggattgtcttagggggcagaaagataatgaaataaatatagtggaagaaaaatagtgttaaaaagtgaaaaatttgtgacagataaaatagtatcccaaaagaccagaaaaaaacaaaaacaaaaacaaaaaaacctgactctagtgagatggtgtaagaacttgcaaagtaaaatgcacctggagcagtcaccgagaaatactgcagtgtctcctgtatgggtggttcatgagcacataagtgagcaggagtgggtggaagaatctcccaagtgattgaatggcctgacttgaaacatgagtcagacacacatttgttttttaatcagcactgccactccctgggtttgtcaccttgaaaatatttgtttacttattttgacctcacttttttagctgtaaattgcattatattagtagggcttgaaaggtaggaatttttttttttttttgaaacaagtttcactcttgctgcccaggctgcagaaggattgatcttggctcactacaacctctgtctcccaggttcaagcaattctcctacctcagcctcctaagtagctgagattacaggcacacaccaccacacccagctaattttttgtatttttttttagtagagacagggtttcatcatgttggccaggctggtctcgaactcctgacctcagatgatctgcctgcctcagcctcctaaagtgctgggattgcaggcatgagccactgtgcctggcaggtaggaaaatatttacaaagggcataaaagaggtgggttttagaaaaaaaattaatatctaattatgtatcccatttgttaaaaattctcatttacctttttctttcccagagtgagtttacaagtttcctcaggtgtgttttttttatggctgggtgcattcaaacagaattccaaggcttagcttttagaatgctagctaccaaggaaaagaatagggaaaaatctctattcattctggctgtacagaatgaatacatttccatgagataatgtggtagataattggtgagttacatagattcatgaaaacatcagttgctctttttgcagggtgaatttgtgactaaatatctctgttcaaatcctgttatcttgatttctgagtttcatgctacattttatgagatgaaacttggtatcacctagaagtattcccatataactgtttactacatggtttttaatgaaaacaataaaataatagatatgttgtctgaaaggaatggatacttttgcttctcttatttaggtacaaaatgtaagtacctttgagtaattttgctggatttttcaaacacatagtttcgaaaaccaagtgagtaactctaacatggaaattaaagcttgagcccagtgactaagagctaaggctaatattgagcctacaaaaggaggttatgaaaggcccacctatgcggtggctcatgcctgtaatcccagcactttgggaggccaaggtgggtggatcacgaggtcaggagatcgagaccatcctggctaacacggtgaaagcccgtctctactaaaaatacaaaaaaattagccaggcgtagtggtgggcgcctgtagtcccagcttactcgggaggctgaggcaggagaatggcatgaacccgagaggcggagcttacagtgagccaagatcgcgccactgcactccagcctgggcgacagagcgagactccatctcaaaaagaaacaaagaaacaaataaaagcccagctagtttttttctggggatcctcccctgcagatgtcccagtctgctcaacccagccatggaagaagcctttctgctgacacagccctggaaagctggggacccacaggcaaatgcagttaggattaagatgaaaggggactgagaggatcttactgatgatgttgttattgttttgaggcagtttctaggctttggaatatcaaagttagatttatgtaaaaaaaaattccgaaagagtattgcaacaggaagaagtaccaattataaaaactgtaagtattggaaagtttaggctgacaagggctttctttcctagggaggagcaaacaggattagaaagaaggtgggaggggaatggcaaatgaaccgtgaaaaatcagattttagatcagagaatgttttaccatgaagtcagcatgttcttagacgagacataaaataaggttgtatgttgaatcagactgaggatagttcaaagttctggagcctgtgaaaaattttatttagaccactgaagacaaatgcagctgattcttttaattggaaaaataagaaaatgtgcagagttctaccagaaagaggtcccaatccaagccccaaaagagggttcttggattttgctcaagaaaaaattcagggtgagtccatacagtaaagtaaaaggaagtattaagaaaatatcacaaggtcaggagtttgagaccagcctgatcaacatggtgaaaccccgtctctactaaaaacataaaaattagccaggcttggtggtgcacacctgtaatcccagctactcaggagactgaggcaaaagaatcacttgaacccaggaggcagaggttgtagtgagccgagaccgtgccactgcactccagcctgggtgacagagtgacactctgtctgaaaaaaaaaaaaaaaaaagaagaagaaagaaagtaaaggaataaaagaatggcttactccataggcagagcagcccaagggttgctgtttgcacatttttatggttatttcttgattatatgctaaacaagggatggattatttatgcctcccaattttagacaatataggatagcttcctaatgtttccatatttgtaagctgtcatgacacttgtgggagtgtagcagtgagggcaatcagaggtcactctcgtcacatcttggttttggtaggttttatttgacttctttattgcaacctgttttgtccacaaggtctttatgacttgtatcttgtgctgaccttctttcctaccctgttacttagaatgcctaaccatccaggaatgcagcccagtcagtctcagtcctattttacccagcccctattcaaaatagatgtgctctggttcctctgacatctcccccatctttttcacaagggcacacttaatcctgagggttgtagagggatgaagatccattttctgtaactacttcatgctgaataggggtgatgatatttttgcctaactattcagttttcttgaccctgaaacaaaggatcagtgacattttatgtgaagtcaaaaagtattactttcatcttccattagttcagtcccttcagttaattcctgttctgtttgattgtcatgaacattccagttctccatgtatactgaatgttttttctctattctaatgtcacaatttctaaagttatcacaaacttgcatttaagaacatctgttgctgggcacagtggctcctgcctgtaatctcagccctttgggaggccaaggcaggtggattatctgacgtcaggagttcaagaccagcctgatcaacatggtgaaaccctgtctctactaaaaatacaaaaaaaatagctggatgtgctggtggacgcctgtaatcccagcctagttgggaggctgaggcaagagaattactcgaacctgggaggcagaggttgcagtgagctgagattgcatcattacactccagctccagcctgggcaacagagtaagactccatctcaaaagaaaaaaaaaatagaacatctgtcaaagttaactataaatcatcttttgaagagtaccaacacaagatgattgtctggatggcaaagtcttagggcagtcacagtgaaaaaaaaaaaaaaccatgattgacaaggaaatttggttagctctgtgtcatataataattttatgtaacgattgtgattattaatgatgttttaccatgaagtcagcatgttcttagaagagacataaaataaggttgcatgttgactcagactgaggatagttatattatcatattagttacattagtcatattagaattacaggagtttcccttaattttggaacacataccaataacatatttacacaaatatagtccaaaaatagtcaaacatgatttcacagttgacagccttttctgtgtgattttaatactaaatgagccaaatttttactattttatatttgtgtatgatttatgtcaaacccaattcttagtgaattttttttaatttttttttttttgagacagagtctcgccccgttgcctaggctggagtgctatggcaggatctcagctcactggaacctctgcctcctgggttcaagtgattctcctgcctcagcctcttgagtagctggattacaggtgcacaccaccatacctggctaatttttttgtatctttagtagagactggttttcatcatgttggccaggctggtctcgaactcctgaccttgtgatcggcccgccttggcctcccaaagtgctgagattacagacatgagccaccatgcccggcctcttaatgaatctttatagacaaatctatccaattttaatgtttgaccataaggtagtattctcataaaccttttataactcttcacaaagtccttgttgttagagtagatcagtgctttaagagaagtctgtcatttttatctcaatgttcaatttctagaaaaaataatacctatttaactttagtcagtatgttgacacacagaatctcttttgcaattaaattttagcaaatcttccacaatttgtttaaaccttcagttttattctatctaatctaaaacattcctttaaccttttaatctaggcaaaaaaatccacatttccatgtcttcttatataaccttttatcaaaaacatatttcactttctctgaattccttgcatgtaaaactgttttttagtagtcaaaattagatgttacaatgttaactcttagcaacttttacttttgatgaaaaccttggtaagtaaggaattttaattacatactaggagtgaagtctaggacacagacacaagtgtatataaggtctgactccagtgtattaatagttagggggtgtggctaacttgatgtgtcccaggccttacttagctgtaaaacaggcaagttgtacagtgaacagtcatagtggcattttgagaagtcttaatttaagaggcctaatgacctttaaattgtacaacatttcttgcataaatttccttcagtgaattatttcatgacttatacagaccatctacaatatgtttgggctttctgatttgtcctaaacatccctctttttaaataaccagtcattttactttaggataagaatttactatacaacatcttttcttatataaagtctcttttctttataacctttgtatatgtaggggacatggctaattccatatgtctcaaggccttatttagaatctactggcttcaagataggtaaattgaacaatttttaaaagtcaaagagccaatttatgaccttgaaatatttggtaaatctaatatgtgacctatataacttagatcaaatgtttatattttgaagactttttattttcccaatgatctttaaaactgtttttatttccaaaagattacttgtcacatgaactaaaaggtgttacacttttaacttttctgacaaaatatttgatttacgctcttactatttttaaaccaattaatcagagttctttcatatcacacacacaacacatgtaaatacaaagacagaagattcagtagttgtaaggtttttctttgtcaatttctttcttttttttgaaggaaagtttgtattattttaattatttttatgtatagaaaactcaacagtgtacatttaacccagtttagtggcaagttctttagtctttgcctttttgagcttggcgatctgagccacagacttgagacccagggccttccctccccagtgatggcggatctcatcctgtcattgtagttggtcctgatagcttcccccagcttagccaaagcacctttgtcttctgagttaacctgtgtgaagacgacagtggtgcaggtcttcctgtggactagacgtcctagtcttaccttccccttgataatgcagtaagggactccccttttatgacacagggcaggcaagaagacaaccagcttgatgggatccacatcatgcgcaatcaccaccagctgaactttctttttctccaccaaggtggtgacagtgttaattcctgctcgaaggacacgtggtctcttaataaggatgtcccctttgtcagcagctttcttctcggcccgggccaacagcctctgcttctcctcttgctttgtctctggtctgtacttgtaggctagcttaagcagctgagtagctgtttggtggtccaggccctgggtgaactggttaatcacagaaaaacactttcagccgcctatagaggatggctctttgctgctgcaacctgatatagtggggccatttcgggtgaggtcccttttgggctggatgtcctgcccagtgccacaattcttaggccttttctcaaacaggaaattcaccactttcttggcctcctgcttcttcacaacagcaggggttggagccaccttcttcccctaggccttctttccttttggcatcttgggtcgggggaggagagcttctttgtcagtttcttaactggattactagtttcagcgtggagcccagggccaggaaagcatgtcgtttttatggcctaaaaagtaaacagagctggaaaacaaaacagatcctcctaaattaagggtaccatttttaaatcagatcttggatctaaaaaggagagaattagttaatcccaagggaagtcttatttctcagtaggggttggggatacctccatatttcctaggtggtcaagattatgtttctctgatccaaatatgaagaactgagtatttccccataattgccattagccattccaaaagtatagttctcacctagttattacatgccaagtttcttttataatgtgaagtaatttctgataccccccaaagtcaaaaacatcagataacgcattgcaaaacgaacagaaccttagattttgagaaggctctatccaccttcaatttttggagtttcatgaggaaaaagtgtttctcaaaagagggcctgcggcacctcttctgtttttcccaaggtgtcccaggctgttagagcttgaatatctgctgtacttaagctgacttttaaccacagtgctttttttttctttttttttttggaatggagtctcgctctgtcgcccaggctggaatgcagtggcgctcgctatcttggctcactgtaatatctgcctcccaggttcaagtgattctcgtgcctcagcctcctgagttgctgggactacaggcgagtaccaccacaccaggctaattttttgtatttttagtacagatggggtttcaccatgttaaccagaatggttctatctcctgaccttgtgatcagcccaccttggactcctaaagtgctgggattacaggtgtgagccaatgaccacagtgatcagtgctcttttaaaaagtccttttaaatttcttattaccagactttattcaggtcaaacagccaatatctctggcttttgaattttaccaaaagtaacttcacaggtgttctgaaaagaaaattcaaggtggttcctggaggggaagagaatcaacaaatggtaaagctcacccaaatatcaaataagaaagtactcattccctaagccgggaattgaatcctgaacctgggccaccattatgatggtggagaccaagagaaaatactgtcatgtggtcacaaggtggagcttccaaggccatgactgagcacttttctgagccatcttgaacagcagccttaaggggtcctaggcctgcattctatcctaaggtacccctcttaatgacagaagaatacagaaagacaaatttattagctcaaagtacaacagatttgttacagcttaagactaacctcacaaatgcattcccatattaattagaactttacatagaagataaacagtattttttttcaccattcattcaatcagtttgcatagagaggctagaagtctcgtcagaaatttgtacacttttgccagcatgccaggcttctgggttccatttccccgagtggccctagtgatgtggctggctgcaccacagccccgtgggccaagccacaacaaaaagaaaaattatctttttctggccagatcaaaatatatgtgacaacatagaccttagccactcttcttaacaaccaatatgaaactggcaagacttaaacttggccccagttgggccctgtcattgttaattcaacttaataatcaggagttttatcttttggtctctaggcaagatggttactctgagtaatataaaataagaaagagaaaagagagaaaaagcattgtctgtggcagggtaggaaggcaaagagctgaggggtccagagaaagacctactcattgcagcgataataaaaagttcaggtggccgcttcttggtaggaaagagatttttttcccaacagtcccattaacacttaagttttcccttttggacaagaaaaagatccccatgtcccatggtcctgtagatgcctaattctgtcacccatagccatcagcaaagagtgcaagacagattaatccaaaaagaatagcaatgaatgtcccatagtgtcaaaccagttcttagctgagacggattttactgagaggggtctgtaactttctgaatcttaggaaggaatataacctttctaagctcggcctcaaatccaagttcagtcaagcatccttgtcttttattaagaggagcctttaacccactgtgtcttaggagagactctaattctcctaagttgtgcctctaacccaatcccatcctttactcaggcatatgcacaccactcacccaaagtcagccgattggtgcacacagatgattttcctttgggtcagaggtctcttaagtatagtccctttgtggttaccagaaagatgttaccggaaagaagttctgatccagaccccaagagagggttcttagatctcgctcaagaaagaattgagggcgagtccgtaaagtgatagcaagttaatgaagaaagtaagtaaatagaagaatggctttctctataggcagagcagtggctgctagttgcacatttttatggttatttcttgattatatgctaaacaaggggtggaatatttatgcctctcctttttcaactattttaagataacttccagacattgccatggcatttataaactatcatagcactggtgggagtgtagcagagaggacaaccacatgtcactctcatcgccatgttaattttggtgggttttatccagcttctatactgcaaactgtgttatcagccaggtctttatgacctgtatcttatgctgacctcctatctcatcttgtgagttagaatgtctaaccatctgggaattcagcccagtgggtctcagcgttatttttactcagcctctattcaaaatagaggctgctctggttcagtacacctctgacagagtctgtgtctggctatgtgataaataagaaaagagagcaccatctaagtcataatgggaagggtgtttctttccataaactatttctagagaacacaaaggatgaagaattttattaatcacagctatttacccagattatgtatgtgcttcattgttccccacctcttttctttgtcatatacatttcttccatttgacttttcctgggttgtactttttataataaactagtaaacataactacagtgttttgctgagttctgtgagtagcttgatctaattattgaacttgaggaaggctgtgggagtccccattttttttcttttttgagacaaagtttcgctcttgttgtccagtttggagtgcagtgccgtgatcttggctcaccgcaacctctgccttccgagttcaagcgattctcctgcctcagcctccctagtagctgggattacaggcgcccaccaccatgcccgtctaattttgtatttttagtagagacggggtttcttcatgttggtcaggctggtctcaaacgcccgacctcagttgagccacctgccttggcctcccaaagtactgggattacaggcatgagccgccgcacccattgggagtccccaattttttttttattatactttaagttttatggtacatgtgcacaacgtgcaggttagttatatagtatacatgtgccatgttggtgtgctgcacccattaactcgtcatttaacattaggtatatctcctaatgctatccctcccccctccaccccacaacaggccccagtgtgtgatgttccccttcctgtgtccatgtgttctcattgttcaattcccacctgtgagtgagaacatgcggtgtttggttttttgtccttgcgatagtttgctgagaatgatggtttccaacttcatccatgtccctacaaaggacatggactcatcattttttatggctgcatagtattccatggtgtatatgtgccacattttcttaatccagtctatcattgttggacatttggcttggttccaagtctttgctattgtgaatagtgctgcaataaacatatgtgtgcatgtgtctttatagcagcatgatttataaacttttgggtatatacccagtaatgggattgctgggtcaaatggtatttctagttctagatccctgaggaatcgccacactgacttccacaatggttgaactagtttacagtcccaccaacagtgtaaaagtgttcctatttctccacatcctctccagcacctgttgtttcctgactttttaatgatcgccattctaactggtgtgagatggtatctcattgtggttttgatttgcatttctctgatggccagtgatgatgagcattttttcatgtatctgttggctgcataaatgccttcttttgagaagtgtctgttcatatcctttgcccacttgttgatggggttgtttgtttttttcttataaatttgtctgagttcattgctgattctggatattagccctttgtcagatgagtagattgcaaaaattttctcccattctgtaagttgcctgttcactctgatggtggtttcttttgctgtgcagaagctcttgagtttaattagatcccatttgtcaattttggcttttgttgccgttgcttttggtgttttagacatgaagtccttgcccatgcctatgtcctgaatgatattgcctagattttcttctagggtttttatggttttaggtctaacatttaagtctttaatccatcttgaattaatttttgtataaggtgtaaggaaaggatccagtttcagctttctacatatggttagccagttttcccagcaccatttattaaatagggaatcgtttccccatttcttgtttttgtcaggtttgtcaaagatcagatggttgtagatatgcagcattatttctgagggctctgttctgttccattggtctaggtctctgttttggtaccagtaccatgctgttttggttactgtagccttgttgtatagtttgaagtcaggtagcatgatgcctccagctttgttcttttggcttaggattgacttggcaatgtgggctcctttttggttccatatgaactttaaagtagttttttccaattctgtgaagaaagtcattggtagcttgatggggatggcattgaatctataaattaccttgcggagtccccaatttttaaacagtagctcagaagcatagatgagcctatggggtttgtcactggcatctggaatgaggacaatgttgtgggactgagatctgaatcagggtctatgctgactctgggtggtgtcagaattgaaatgttagacactgagttgctgtttgagaattgcttggtgttcagcaaactctacagatttggtggcagaaggaagatatcccagagccctgtcctggtataaaatgagtgtctgcaaatgggaggctcttctctcctgcacacaggctttcacactacctattgtcttgggatcccagggctcctgccaggattgaagaggatgaaaacttcaaggaaaggagctctgatgacagacccccttttcacaaagctgccaccacaggattcccacccacacccaaatatgcccactagacattgatgtatccacacctctcccagcactaggcaccaccctcaggaatttcactatagcattgttgattttagtgtttcttgacaaaaacccacaaaagtgtctacaagtctcctggcatatccccacatgcagacgctgaatctgccacagcaacctgttttccccaccaagctagggttctgggccacctgttcataatctcatctgcctacaggcacacagaaataaatcagagtccagccccacctgggccaccatctgtagaacaaacaactccttgcacctacattgcactcttccccacgcatggattttttttttcttttaacttttctttttggttaaggggtccatgtgcagctttgttatataggtaaaattgtgtcatgggagtttggtgtagattgttttgtcactgaggtactaagcgtaaaaccgaacaggtatttttttctgatcctttttgtcctttcgttctgcattctcaactaggcctcagtgtctgtcgttcccttctttgtgtccatgtgttattattatttagctcttataaatgatagcatgcatttggttttgtttcactttagctttctaaggataatggtctccagcatcatctatgttgctgcaaataacttaatcttgttttttttttttaatggccacataatcttccatgatgtttatgtaccgtactttgttttttattaaatcttctattttatttaattaatttatttggagactgtgtttcactctgtcacaaaggctgaagtgcagtggtgcaatcttgactcacttcagcctcaaccttccaggctcaaggcaccctcttacttcagcccccaaagtagctgggactacatccatgcaccaccatgcccagctaacttctttttctatcttttgtagagatgagttttgccatgttgcccagggtggtcttgaatgcttgagctaaggcaatccacctgcctcggcctcccaaagtgctgagattacaagtgtgaaccacctcacccaaccataccatattattttaatctagtctaccattaataggcagttaggtttgttttgttttatgtctttgtttgtttgtttgagatggagtcttactctgtcacccagactagagtgcagtggtaccgtctcacctcactgcaacctctgcctcctgggttcaagcaattctcctgcttcagcctcccatgtagctgggactgcaggcatgtgccatcacgcccggctaatttttgtatttttagtagagacagagttttgccatgggattattgtatgcagcctattattgactttctaattacagccattctgattggtgtgaggtggtatctcattgtggtctttttttgcttgttttttgcatttctctagtgattagtggtgagcatttgttgcacatgcttgttagccacgtttgtcttcttttgaaaagcatctgttcatgttttttgcctacttttttttctttttttttagacagagtcttgctctgtcccaggctggagtgtagtggtgggaccttggctcactgcaacctctgcctcctaggttcaagctattctcctgcctcagcctcccgagtagctgggattacaggtgtgcgccaccacgcctggctaatttttttggatttttttagtagagacggggtttcaccatgttggccaggtttcaaacccgaccccatgatccgcccgcctcggcctcccaaagtgctgggattacaggcgtgagccaccgcacccggccatttgtctactttttaatgaattttttttttttttttgctctgtattctgctgccttgttctgcgagtctgtttttgtaccaataccgttctgcttttgttaccgtagccctctagtgagtgtggtttgaagtggggtaatgtaatgcctccagctttgttctttttgcttaaaattgccttggcaattcaggctcattttggttccatataaattttaaaatagttattttttagttaacagcgttttggtagtttgatacaaatagcattaaattggtaaatgtctttgggcagtttggccattttaataatattgatcttttctatctgtgagcataacatgtttttttaatttgtttgtgtcatctctgacttttgttgttcttgagacagagtcttgctctgtcacccaggctggagtgcaatggtgcgatctcagcttactgcaacctctgcctccctggttcaagctattctcctgcctcagcttcccaagtagctgggattacagtcacatgccaccatgcctggctaattttttttgtattttaatggagacagggtttcaccatgttggtcaggctggtctcgaactcctgacctcatgatccgcccacctcggcctcccaaagtgctgggatacaggtgtgagctactgggcctggccatctctgacttctttaagcagtattttgtcattcttgttatagagatctttcacctccctggttagctgtattcctagatattccattctttttgtggcagttgtgaatgggattatgtttttgatttggcttttggcttggatgttgttgatgtaaacggatgccattgatttagtaccctgaaactttgctggagttgtttatcagtttaaacagctttttgctgagactgtagggttttgaagatatagaatcttgtcatctggacataaggatagtttgacttcctctcttcttttttggatgtcttttattttaatctttttcctgattgctttggccaggacttccaattctgtgttgaataggagttttgagggaaggcattcttgtcttgtgccagttttcaaggaggaatgcatccagcttgtgtccattcagtatgttggctgtaagtttgtcatagatgactcattattttgaagtatgtaccttcaatgcctagtttgttgagggttttaagcatgaaggatgttaaattatattgaaagtgtttttagcatctattgagataatcttgtgggttttgtctttagttctgtttatgtgatgaataatattcattaattgttgtatgttgaaaaaaccttgcataccagagatacagcctacttgatcacactggattaacttgatgttctcctggatttggtttgccagtattttgttgagaaagttttcttcagtgttcatcaaggatattggactgaagttttctattttttgttttatctctgccaggttttggtatcagaattctatatagaattatgatatatatatatagtatacaaaaagagtatactattctttttgttgttgttgttgttgttggaggcggagtctcactctgttgccaggctggagtgcagtggcgcgatcttggcttaccacaacctccacctcccgagctcaagtgattcgcctgcctcagcctcacgagtagctgggactacaggcctgggccaccacacccaggtaatttttgtatttctcgtaaagacgggttttcaccatgttggccaggatcgtcttgatctcttgacctcatgatctgcccacctcagcctttcaaagtgctgggattacaggcatgagccactgcacctggctgatgctattcttatataatgagttgaaaaggagtcccttttactcagtattttaaaataattttggtagaattgataccagctctttgtacatcaggtagaattcacctgcaaatttgtctggtcctgttctttttttggttattaggctatttattactaattcaattttggaacttgttggcctattcagggattctgttttgttgctgttgttattgttcagtctttggaggatgtatctttgctccaaggttgcagtcctaaacttggcccaaatgaactctctacttatattcatgttgcctcagcctttttttttttttttttaggtagacatattacttagagtatgctagaacagcctctatgaggagatttttcctttgattgtactttacttgatgtaacacccaaggatgcaagccaggttgatcccacctagaatctgcacataacatcttgcttctgcctgggattcacaagacagggccagactttggattgagaatatacagaaaaccaataggaggcattttctgcattgtgagatgtcaacatagacatctgaaaccccgctttgagaatgtggctttttaagctttttagatcttgttcaatgacctgttacagttatgtaagaggctccaggtgtaaatagagtctgatgacagaatctttaagtttaaacaagcatcttaagagtgagagatcaaggccacaaaatatccagagccatgacaaccacaactatacctacgtgtaaaatgtcatgctggagcagagtattcttgtccttcctcttacccaaaagtgaatgaatcaggataggtgatccaggttctggagctccaccagagcagttccattttctatttagaatcagcctgagtctctccatcctggcttatcagtgggccctcagccgtggatcactaagaaccgtctcacaatcacctaggcatctttgagacatttgaggatgtccagggcagaactgtgtcaggctgacaagagtgattaattctgcttctctcagtataagagaaagaagtaatcctgtgttttttactcccttcatataagaggtcactttagttggtaccaagatgagagtttctccagtttcctagtacttaggtgaaagacaaagaggaggtcttgtgactcaaataaactaattgcttccatttcatatggtcattcaaaacatagatgaaccaggtgcggtggatcatgcctgtaatcccagcactttgggaggccaaggtgggtggatcacgaggtcaaaacatcaagactatcctggccaacatggtgaaaccccatctctgctaaaaatacaaaaattagctgggcttggtggcacgtgcctgtaatcccagctactcaggaggctgaggcaggagaatctcttgaacctgggaggtggaggttgcagtgagctgagatcatgccactgaactccagcctggtgacagagcaaagttccatctctaaataaataaataaataaataaataaagcagtcatgatccctaccatccaggaacttttagtctagactagcaactgggtacatggttgaattaagtattgtatggttagtacaatgaatagatgtgtacaaaaaaacttgagctttatttgggccactttttttgtattgttgtgacttctgatatcatctgaagggatatttatggacaggagaattttattattattcgtgtttcttttaccttgctaagaatacatatatatcatctgataaaattatcctagaaaaccttgagagatttgtttaagttgcttattattatatgttataacattgaaagggcagattaaagttacataaactctgggattttagtttctcttaggtaaacttaggaaaaactgaactggaaataccccagtggcatagagaacagaattctacagagggtccagtgcctaacccaggtctgttttgtttgtttgtttgtttgtttgtctaagatggagttttgctcttgttgcgcaggctggagtgcagtggcgcaatctaggctcactacaacctccacctccctggttcaagtgattctcctgcctcatcctcccgagtagctgggattacaggcttgcaccaccatgcctggctaatttttgtatttttagtagagagaaggtttctccatgttggtaagactgatctcgaactcccgacctcaggtgattttcccacctaggcctcccaaagtgttgggattacaggcgtgagccaccgcaccaagcgttcaccccttgttttttgtttttttgttttttgcttttttcagttggagtcttgctcttgtttcccaggctggagtgtagtggtgcaacctcggctcactgcaacctctgtctcccaggttcaagtaattcttgtgcctcagcctcccaagtaactgggattacaggtgcctgtcaccacatccagctaattgtgtgtgtgtgtgtgtgtgtgtgtgtgtgtgtgtgtgtgttttcttgaaatggagtctagctctgtagctcaggctggaatgcagtggcatgatcttggcacactgcaacctccatctatgggagtcaagcgattgtcctgctgcagcctcctgagtagctgggattacaggcacctgccaccatgcccatctaatttttgtatatttagtagagacagggtttcaccatgttggacaggctggttttgaactcctgacctcaggtgccacctgcctcaccctcctgaagtgctgcgattacaggcatgagccactgtacccggcaatttttgtatcttcagtggagacagggtttcaccattttggccaggctggtcttgaactcctgacctcaggcgacttacccacctcagcctcccaaagtgctgggattataggcatgaccaccacacccgaccagattcaccctttttggagcccttatttaggtctggccccaccctggagtcttgcatcacaaagctgatttaaaaagatgagagtttttgctggtgaatcctgctgcctttctagagctggtgctcaaaatttcagaaacccaaaagcaggtaaatgagaaaaataaactgtatattttgggatcctaatttttaagttttgtgttaaaaccagtgcttacagaaatattccatttagcaacttgttttctattcctgcagatccagtagttgctccacaagtaacaaaaaagtaaatataaacacaataaaaatttctctaaactacattaaattctctcattctgtatccctcctatctgtctatatttagcttttattctatacattttatttttaaaaatgacagagaaacagatgaagaaataaaaatgctgaaccctttatctaaatcctgggaattattgaacacttagagtcaacttccagggtgttatgaggattaagtcacataatgtgttattccccacatagtgctctgtaacatactcttgagcagatagtacctgcttaataaacattgcattattacatgtttacatgttgtttttcaaatgcagaattattctgaaattgctgctttctgtttcctctgtaaactttaaagagccagcaaagaatacgaaacgtttggatggagattggttgtctccatttgtaccagaaatatttgtgttgtgacaacagagctgagtgtaagggactctgtgctgtgcccgctttctctaactactgctaataatgaacccaggggtagcaacatcagcattggcaggggacttgtttgaaatacccattcatggactttttccaaacctgcagattcacattacatagattgggaccaaaattcccaagtaatgttggttttttttgagacggagtctcgctctgtcacccaggctgaagtgtaatggcacgatctcgtctcactgcaacctctgccctctgggtttaagcgattctcctgcctcagcctcctgagtagctgggattacaggcatgcaccaccacgccagctaattttttatttttagtagagatgaggtttctccctgtttgtcaggctggtcttgaactccagacctcaggtgatccgccccactctgtgtcccaaagtgctgggattacaggcgtgagtcactgctcctgatcctattaccaagtaatttttaagctcattaaagcttgagaggcagtgcttatcagcccacttctctcattaggattacacggtgaaatcctgactctactaaaaatacaaaaattagctgggtgtggtggtgtgtgtctgtaatcccagctactcaggaggctgaggcaggagaatcgcttgaacctgggaggcggatgttgcagtgagctgagattgcaccattacactcgagcctggtaagagcgtgaaactccatctcaaaaaaaaaaaaaaaattgcagaaatctctttacttgtgccctttccacagtttctatttattgttctgggtggaagcatccatgttgttttaatgaagggcctcatgtgactctaagctgaggccagaatcaaatatgagggcttcaaaatacattcatgagagtgaagtgccacctttgtactaaagggtggtcacagggcccgttcagtttgggtttggtagggacagggcagtgtggtgcatatttccattactgtagcagaatttgctggtgtctgtggcaggggagggcacctgtggacaggaaaagaggaacacttttaatatggcagatcatatttttatttccatggagcagctcattttttcctgaatctcttctgttataaaggagagaaatgcatggactttttggtcttggtccttctgtgtgtgggcgtgacactagtaggtaagcaggtggtgctgatgcttttaagggaattttctcaagatgcaggtgttacttgtccagagaattttatctgaaaaggatttccagagaaggaggagaaagaggaataatggcttcttttcagctaaacatgtctcagatcaagagctgtgtccactctgcctcctggagtgccatgtgtttagtacttggaaaccttctctgcttgtgtttttcctccccagtgagtttgtttcaggtactttaaaaaattcttgtaatagtcaagggtctctaaaaaatatttgtttctggctgggcgcggtggctcatgcctttaatcccaggattttgggaggccgaggcaggtggatcacttgaggttgggcgttcaagaccagcctgaccaagatggataaaccccgtctctactaaaaatacaaaattagacaggcatggtagcacatgcctgtcatcctagctactaggaggctgaggcaggagaatcacttgaacctgggagacggaggttgtggtgagccgagatcacaccattgcacttcaccctgggcaactcaaaaaaaaaaaaaaaaatgttttcctatgcaccagacccttctctacatcatggcttcttatatgcaatgcagaattcctaccatgaatttatgatctgccatattaaaagtgttccttttgtggctgttgaacatgggaagatgtggatactcaagattcctactggggaaaagctggggtccttagtaaagatggagaacatataatgttgtggtttcatctaaacccaggaagttgtgaaaaaattattaagagatacctgctctctagagtgctaaagaaagactacttaaaatcattattaaaattatggaatgcgggagatatcttgacctttgcataaaactgattttttaatggttaaattcagtctataattgactttttgaggggcaatatctcagcagtgatgctgtgttcttctgtgtgcatcagcacatcatagaaatttgttctagtgtagttgatgttaataatttacttggttaaagagctctgtgactttttttcactatagagttaattatttttatctttattattaagtatctttatacagctaatgtgcataaaccatcacaattaatctggtgcctgcccttttttcttaggtttttttgtttttgtttttttttgcatgtgtctgtctttggaaaatgaagacacttgactttgtttacaagccagaaacattgggaaaaacacagtctctttcacttgcctaatgtttgacaaaatagtcttcctgggataaaaacattggcattactagtgacctttttagaattttaaaaactcagactttattccagatcttctgaaaaatataaaaaaatcttcatggcaggatctccagtttatcgtgcacatttaaatttgagaggtaccttctgactcaacatgtttttctttgtctgaaaaatatacacaactcattatgatgtaagtatagcactcaataatgtatatgtttgtgtttgtgtccttaattatatactttatcatccagagaagtatcatatatgcactggtgttgtggatcttaggccattctctgccctcagagtaggagaatacattagaaaatatttctgtgttaaaaattattggataatttcagttattcttataagtcagaatcagttctctttactctctcaattcaccttaattcaaataataaattctgcccatggccacttggtaaatatatgtgtgtctctgtgcttgtgtttttcaggagacattgacatttagggatgtggccatagaattctctctggaggagtgggaatgcctgaaccctgctcagcagaatttatatatgaatgtgatgttagaaaactacaaaaacctggtcttcttgggtgagaataactttcatacacaattcttaatatgccctaaatgtttcatgtctctttttttgtagaatttttttgataatttatgctttgtataaatgagtttctaatcccagttttcaagaaaatcttgatgatttgtccgtgtggaaaagaatttcttcaacgtgtttcatcttgatctgaactttccacattcctgagctgatgtgtatccttcactctagattagtgataattccagaaatttagtggcataaaatatcactgcccatatcttaaaatctatttgccatcaccaatttttgattcaggtagtaaaattaaaaacctacaaatttaaaatattttctaaatagttagagatgtctctctttaatcagtattttcagattaattttattttatttatttatttttttgagatggaatctcaccctgtcacccaggccggagtgcaatggtgcgatcttggctcactgcaacctccaccctgggttcaagcgattctcctgcctcagcctcccaagtagctgggattacaggtgcacacctccacacccagcaaatttttgtattagtagatacagtgtttcaccacgttggccaggctggtctcaaactcctgacctcaggagatctgcccacctcacccttccaaagtgctgggattacaggcgtgagccactgcgcctggctaaaacacttttttttttttttgagatggaagtttgctcttgttgcctaggctggagtgcaatgcactatcttggctcactgccacctccgcctcccgggtccaagcaattctcctccttagcctctggagttgctgggactacaggcacctgccaccatgcccagctaattttgtatttttagtagagatggagtttcaccatgttggacaggttggtctcaaactcctgacctcaggtgatctgtccgtctcggcctcccaaagtgctgagataacaggtgtgagcaactgcgcccagcctttggattaattttctaaaatattctatcacatcctttttactgagcacagtactaggttagtaattagagaatataggcaagattcatgttatttatttttaataaagcaggtgttgctgtctctaagcaagacccagtcacctgtctggagcaagaaaaagagccctggaatatgaagagacatgagatggtggatgaacccccaggtaggtgagagtgaaaaaaaacagatgacacagatgagaggtccaaagcttaaaaaaaaaaaatgtgccagtccttacaatgtgttttgggaagctgtgttataaagcatgtagtttctgggaggcctgaatattttcttaaaattttttcttacatagggacatcttctgtcttatgcttttaaattctctaagaattctacttttccttgggggatcttccttcaagtctacaagagagccaaagcatattgtcatagcatataaaagactgtcatggcatataatctgactgcttttttattgttttgggggacgcacaaatatctgtataattttgaaaaattctttgttaaattattttttagttctctttttgaatcctgtctgaaatatgtgagagtagtgatttctgttccattaggggtttcttgttaatttttttgcatatttcatcctgtttgtattactatagtcttaaaatatagtttgaaattataaattatgatgtccctctgctttgttcttttttctcaagaatgctttggctatttgaaatttattacaatttcttgtaaattttagaattgtattttctattgtgaaaaaaataccactggaattatcatggggagtttattaaatgtatagattactctagataatatggcattttaacaatattctttcaatccaagacatgaattttttttttttttgagacagaatctcactctgtcatcaggctggagtgcagtggcacaatcttggctcactgcaacctccacctcctgtgttcaagcgattctcctgcttcagccttctgagtagctgggactacaggcatgtgccaccacacatagctaattttttgtatttttaatagagttggggtttcaccgtgctgttcagactggtctcaaactcctgaccttgtgatctgcccacctcggcctcccaaagtgctgggattatgggtgtaagccactgtgcctggccaacatgaaatattttaaaatttatttttgtcttctctaatttttttcattgatatatatttcattgtaaagattttttaccttcttcgttatatttgttctcagaaatttattttaatgctattattaataagactgttttcttcctctattgtatcagatagttttaagtgtatggaaccataactttatgttaattttatattttgttaagttactgactgtatttattagtttagacaaatttttcttttttttcttttttgagacacagtctcactgtgttgcctaggctggagtgcaatggcataatctcagctcactgcaacctctgcatcctaggttcaagcgattctcctgcctcagcctcctaagtagttgggattacaggcactcggcaccagcccagctaaatttttttttgcatttttagtaagacggaatttcactctgttggccaggctggtcttgaactcctgaccttgtgatttgcccccctcagcctcccaaaatgctgggattacaggtgtgaaccactgcgcctggctgtttagacaaattttaatgtactgtttatggtttttttatatataagatcatatgatccacaaacagcaactttttacttatttctctttaattccaatggcttttaaaaaatgttcttgactaattcttgtgccacatactttcagtgctaccttaaaatagaagcattgacaatgggcgcaatatagttttatattggtatctgtgaatttgaaggagcaaacaactccttagcttttataaacaggtttcaggaggtaaagatctttttctgttgtgtccctagggtgatggaatgccctctgggtttgtagtgaagaggggttgtagctttgtcacaaggctgctgggtctgcactagagtccacctttagatggcttgtcacaagggcttgggtaattgtaattcccattttatttttggacagattgtatatattctttaagactttgatctgtagggcagataccagggcagatttctgcagttggctccttatataatggccctatcaggatgtgaatgggtttgcctttcactgaataccagagaggatttcttcaggtcactgtgtgggtttctgtttaggaaaaactgatcatgatctgcggctcagagagctggaactgagtcaataaactgcttcagggaccacagtaaaaaccaaggtctgtaaacctgtctgcatggctgcaaataggtgtcttcctccaggtctctggaagggcaggacctctcttagactgtaactgggaggagtttgggatggttacagagttaatttcagaattctctgttggaccaagttgggtggaccatttcttgatctgtagccaaaaccaagggtcctgtaatttcccacacgaataagtgcctgtcctctgaaaaaacactcctcaatcttgggctttagcagagtttcacaactccctccctgcatctcaaagctctcttaaaggcacttactttggagatgggatcttgtttatcatctggtctggaaatccaggcctgcagcaattctccaacctcaatgtaccatgtagctgccattaaagatgtgagccatgatggctggctgtctcatgaaggcattttttgtcagggatgactgaataaatttttttttgtggcgaggataatcaaatagagcaccttctatttttttatgtcactgatgttactctttctatacatttttactttcgattttccatttcaaacttctctgtcattttagattcagacatttaggacaatatgctagaatttacatgttatgcctgaagtaaattagataattggtaggcactccatattactaagatggttacttataaatttaagttcgctgcaggtaaaaaggaattataggattttcacccactttcttcagcatatatctaaatgataacataatttctttcttttcttttcttttcttttttttttcttttcttttcttttctttctttatgagatggagtgtcaatctgtcacccaggctggagtgcagtggcatgatctcagctcactgcaacctgcacctcccaggttatagctattctgctgcctcagcctcctgaatagctgggactacaggcgtgtgccaccacatatagttacttttttgtatttttagtagagtcggggtttcaccatattggccaggctggtctcgaactcctgaccttgtgatccacctgcctcggcctcccagattgctgggattacaggcgtgagccattgtgcccggcccaacataatttatttctaaatatttgttttacatatcagaggctgtaaccctactttgcaaaatatacgtttaaatttagcaatgtaatgctattctttgcttctaaagttgaattacagtggtttcaattttgtgtaagaatagcatatatttaaaacgtaaaatttatcatattttttacatgcttatttaaaaagtttcttattagactattctaattatactgcatattctgtgaaattttactgccatacagtgcatgccaatgattcaaaatacctgccttccctgagtacacagtcaactattgtagttatctagacaattcttttttaatggtactttaatgttgcataccagattttatgagtaaacatgtctcttattacgcagtttcttattagcgttttttcagtataggtttcttaacatcagcttgttgtgttttttagtttttcttatataattttagccaatttgcaattctgtttgtatactttaagtcaatgtgaggtgtaattaagagataagtcagccatacgtctatcacgatcagattatatgtgtgtgtgtttatctataaatatgaccccaatattggttatgacttatctcatatatattctttcttaactgattttcagtggctgttttatcttgtctaagtgagtagtcatgaaaatattttcattatgtcttattttcaccatgtttctaatgatgaatatatatatatatatttttttttttttttttttttttttttagacagagtctcgccttttcgcccaggctggtgtgcagtggcacaatctcggctcacggcaacctccacctcccgggttcaagtgattctcctgcctcagcctcctgagttgctgggactacaggcatctgccaccatgcccggctaattttttgtatttttagtagagatgggatttcaccgtgttagccaggatggtctcaatctcctgacctcgtgatccacctgccttggcctcccaaagttctgggattacaggcatgagccaccgcacctggcctgaatatatattttctttgtgtgagaaaaacatttttgtgatttgaaggatattttgagaagatttataattctgtatttttttctgtttttcctttagaaaaattaattgttgtaaaaacataacaggccagtcacggtggctcatgcctataatcccagcactttgggaggcagaggcaggcagatcacttagggtcaggagctccagaccagcctggccaatatggtgaaaccctgtctctactaaaaatacaaaattagccagacatggtggtgtatgtgtgtaatttgagctatacaggagactgaggcaggagagtcacttaaacccaggagacagaggttgcagtgagccgagatcatgccaccacactccagcctgggtgagagagcgagattccatctcaaaaaaaaaaaaaaagaaagaaaaagaaacaataaaaacacataacataaaatttagcatcttaaatctatttaagtgcacatttcagggccagacatggtggtggctcacgtttgtaatccctggattttgggaagccaacacagcagtatcatttgagccccaaagtttgagactagcctgggcaacatatggagatttcctctctataaaaatttttaaaaatatctaggcatagtgttatgcacctgtggaccccgctatatgggagatttagggaggattacttgagcctaggagtttgaggctgaagtgagacataattgtgccgctgcactttagcttgggtgacaaagtggaccctgtcttaaaaagaagctgtacatttcagggatgttaaatatattcacattgttctgcaaaagacttctagaaatttcacatgttgtgaaactaaaacccaatatccatttaagtgacaagatgccattttaccctctccccagtgcttgacaaacacccttccactttctgtttttatgagtgtgactacttaagctatctcatataagtagaattatatagtattcatcattttgtttctggcttatttcaagtgacataatattttcaaagtttatcttaaaatgtgacaagatttctttgataatatttgatttaattatgaaaacatttgatctttgatttctgtgatatttcattgaatatatatgtttcatttttgatgtgtttataaattaagagacacctgggttgcttctgccttttggcttttgtgagtaagggtacaataaacatggatgttcaaatatgtcttctaggtcctgtgttggatagtttggatatagcttcgtaagagtgggattgctgtatttgataattccattgttaattatttaagaagcatgtataacatttttaaataatggctgcttccttcttttctaccaacaatcagcataggctttattttcattgtatcatcaacagattttgtgttttaaaaaacatgtagtatatttttaaacatatagtatagtggccattgtaatgagattttatttctttattattttttattttttgagatggagtcttgctgttgtcatccaggcctgctgttgtcacccaggcaattggcacgatggctcactgcaacctctgcctcctgggttccataaattctcctgcctcagcctcctgagtagctgaggttacaggtgcccgccaccatgccaggctaatttttatatttttagtagagatggggctttcacagtgttggccaggctggtcttgaactcctgacctcagatgatccgtccacctcgacctgccaaggtgctgggattacatgcgtgagccaccacgcctggcctcatttttatttttatgagtttctctacaaatcattaattttgcttttcttttcaaatggtttttcccatttgaatatcttttttgatgaaaatttagttcaattattttttctttctttggttttttttcttttttttttgggagtctcactctctcacccaggctggagtgcaatggtgcaatctcgacgcactgcaacctctgcctcctgggttcaagcgattctgctgcctcagcctcctgagtagctgggattacaggcgccaaaattactctttgtcttccaccatgattgtaagtttcctgagaccctcaccggaagcagatgctgttacatccttcttgtacagtctgctgaactgtgagccaaataaaccttctttctttgtaagttacacactcaggtattcctctatatgcaaaatagttaatacagtctataatgcctgttttctgttttcttactgatattttatctgaattttctattattgcaaatgatgtcttgatcgccacaattatgttgctatgtatttcttccttcacctttgtcaacgtttgctttatatattttggagcccttatgtcatatgtatgtatacatataaatagatatgatagttacagattcctggtaaattgactcatttgaccgttatataatatcgtgtttgtcctatgctgttacatacaagcatatgtcctatgctgttatatacaagcatattatatacaatataattattaccacctcacccaattgtggttactatttgcatggaatatagattttttcagttctgttactttcaacctatttgactcaatgctaaaatgcctctcttatagacagcaaattgtatactttttaacttaagctactaaggcatcttatttctttttctttttataaatgtatgtatgtatgtatttatgtatgtatttttatttttatttttttgagatggcatctcgctctgtcacccaggctggagagcaatggcatcgatctctgctcactgcaacctccacctcctagattcaagcgatattccttcctcagcctcccaagtagctgggagtacaggtgtagtggctaatttttgtatttttagtagagacggggtttcaccatgttggtcaggctggtcccaatctgacctcgtgatctgcccgccttggcctcccaaagtgctgggattacaggcatgagccgctgcacctggccaatgtatttatttttgagataaagtctcactctgtcatccaggctggtttgcagtggcatgatcacgactcactgcagcctcaacctcccaaactcagatgatctcatttcagtttcttgagtaactgggttgcaaatgtttgccatcccaaaccgagatagttttttgtacttttttctgtagagacagttttttgccctgttgtctaggttggtctcaaactcctgagttaaagtgatcagctcccttggcctcccaaagttctgagattacattatttttattaagtaatttaactaatttttaaaatgactgcttaaagatataaagttactattaccagttttattgttgttctttttttaagtttaatttaatttaattttatgttccaggatacatgtgcaggatgtgcaggtttgttacataagtaaatgtgtgctgtggtggtttgctgcacctattaacctctcacctcggtgataagccctgcatgcattagctatttatcctgattctctccctccccgtgacagaccccagtgtgtgttgtttccctccatatgtccatgtgttcttattgttcaactcccacttaataagtgagaacatatggtgtttggttttctgttcttgtattagtttgctgaaaataatggcttccagctccatctctgtctttgcaaagtacataatcttgttcctttttatggctgcatattagtctatggtgcatatgtaccacattttctttatccagtctgtcatagatgggcatttgggttgatgccatgtctttgctattgtgaatgttgctgcaatgaagatacacatccatgtatcttcataatagaatgatttatattcctttgggtatatacccagtaatgggattgttgggtccaatagtatatctggttctaggtctttgaggaatcgccatactggctttcacaatggttgaactaatttacattcccaccaaaagcgtaacagtatttctatttctccatagcctccccaccatctgttatttcttgattttttaataatcacctttctgactggggtgagatggtacctcattgtggttttgatttccatttctttaatgatcactgatgttgagctccacataaatgtcttcttttgagaagtgtttcttcttgttctttgctcactttttttttttttttttttgagactgagttttgctcttgttgcccaggctggaatgcaatggtgcaaactcagctcactgccacctccgcctcccaagatcaagcgattcttctgcctcagcctcctgagtagctggcattacaggcatgtgccaccatgcctggctaattttttgtatttttagtagaggtggggtttctccattttggtcagggctggtctcaaactcccagtctcaggtgatcctcccacctcggcctcccaaagtgctgggattatagccgtgagccactgtgcccggcctttgttcactttttaatggggttgtgtaattcttgtaaatttgtttaaattctttgtagactctggatattaaccttagtcagatggatagattgcaaaaatgttctcccattctgtagatcgtctgttcactctgatgataatttattttattttatttatttattttttttcagacagagtcctgctctgtcacccaggctggagtgcagtggcacggtcttggctcactgcaacctccacttcccgggttcaagcaattctctgcctcagcttccagagtagctgggattacaggcgcctgccaccatgcccggctaatttttgtatttttagtagagatggggtttcaccatcttagccaggctggtcttgaactcctgaccccatcctcatctaccccctttggcctcccaaagcactgtggttacaggcgtgagccaccacacctggtgataattacttttgctgtgcagtagctctttagtttaattagatcccatttgtcaatgtttgcttttcttgcaattgcttttgacattttcatcatgaaatctttgcccatgcctatgtcctgagtagtattgcctagattttcttcaggggttcttgtagttttgggtttcacatttaagtctttaattcatcttgagttaattttttataggcataagaaagaggtccaatttcaattttctgcatatggctagccagttctcccagcaccatttattaaaagggaatccttttccattgcttgtttttgtcagggttttcaaagatcaaatggttgtagatatgcaatcttatttctcagttctctattctattccattggtctatatgtatgtttttataacagtaccaggcagctttggttactacagctttgtagtatagtttgaagttggatatcatgatgcctccagctttgtgttttttgcctagaattctcttgactaggccaggcacagtggctcacgcctgtaatctcagcattttgggaggctgaggcgggtggatcacttgaggtcaggagtttgagaaaagcctggctaacatagtgaaaccctgtctctactaaaaatacaaaaaattagcctggcatggtggcacattcctgtaatcctagctacttgggaggctgaggcaggagaatcgcttgaacctgggaggcggaggttgcaatgagctgagatcatgccattgcactcctgcctgggtgacagagtgagactctgtctcaaaaaacaaaaagaattatcttggctagatggggtcttttgggttttcatatgagttttaaattttttttttttctaattctgtgaagaatgttagtggtagtttagtcagaatagcatggaatctataaattactttgagcagtatggccatttttacaatattctttctatcttttttatttgtttgtgtcctctctgattttcttgggcagtggtttgtagttctccttgaagaggtccttcacttcccttgttagatttactccttggtactttgttctctttgtagcaattgtgaatgggagtttattcatgatttcgctctctgtttgtttattgttggtgtattgaaatgtttgtgattttggcacattgattttgtatcctgagactttgctgaagctgcttattagatgaagaagcttttgggctgagacaatggggctttctagatctaggatcatgtcatctacaaacagagacagtttgacttcctatttgaatatcacttatttatttctctcgcctgatttccctggccagaacttccaatactatgttaaataggagtggtggggagagggcatcctcatctagtgccagttttcaaggggaatgcttccagcttttgcccttttatatcggctatgggtttgtcatagatcttattattttgatgtatgtttcatgaataccttgtttattgagagtttttaacatgaagggatgttgaatttgttcgaaggccttttccgcatttttgagataatcatgtagtttttgtctttagatctgtttatgtgatgaattacatcgatttttgtatgctgaaccagccttccatcccgggaataaagctgacttgaattacatcaatttttgtatgttgaaccagccttgcatcctgggaataaagctttttgacgtgctgctggattcagtttgccagcattttattgagaatttttgcattgatgtttatcaggaatattgacttgaaggtttgtgtgtgtgtgtgtgtgtgtgtgtgttgttgttgttgttttattttgttatatctctgccaggtcttgatatcagggtgatgctggcctcatagaatgagttaaggagaggcccctccttttccatcatttggaatcgtttcagaagaaatggtaccagatcctctttgtgcctctggtagaattcagctataaatttatctgatcctggactttttttgttggtaggctgttcccgcctcaatttcagaacttgtcattggtctatgcagcgattcaacttcttcctggttcagtcttgaaaggatggatgtgtccaggaatttatccatttcttctagatgttccagtttatgtgcacagaggtgtttatagtattttccgaacattgtttttatttctgtggggtcagtgatgatagcccctttatcattttttattgtttattgcatttttctctcttgttttattagtctagctagcagtctattttattagttttgtcaaaaaaaaccagctcctggattcattgagtttttttgaagggttttttgggtctttatgtcgttcacttccactctgaatctggttatttcttgtcttctgctagcttgaagttttgtttgctcttggttttctcgttcttttagttatgatgttagggtgtccatttaagatctttctagctttttgatgtgagtacttagtgctataaatttccctgttaacactgctttagctgtgttccagagattctgttacattgtctttttttttttttttttgagacggagtctcgctctgaccccaggctggagtgtagtggtgtgatctcggctcactgcaacctccgcctcccaggttcaagcaattctcctgcctcagcttcccatgtagctgggactacaggtgccggccaccaagcaaggctaatttttatatttttagtagagacggggtttcaccatattggtcaggctggtctcgaactcccgacctcaggtgatctgtccgcctcagcctcccaaagtgctgggattacatgtgtgagccaccacgcccggctacattgtctcttcattctcattggtttcaaataattttttgatttctgatttagttgtattatttacccagaaataaagaggagcaagttgttcattcaggaaattcattcaggagtaggttgttcagtttcgttgtagttgcgggattttgagtagctgggattacaggcgcccaccaccacacccagctaattttttgtatttttagtagagatggggtttcactatgttggtcaggctggtcccaaactgtgtcatgactctttatccagcttgcccttctgtgtctttcagttgaggtattcagcctattacatttaaggttagtatttttatgtgtgattttgattctgtccaagtagtgctagctgcttattttgcagagttgttgatgtagttgttttatagcataattgatctttgtacttcagtgtgtttttgcaatggctggtaatggttttttcttcttaaccttagtgcttctttcaggagctctagcaaggcaggcctggtggtgatgtgctccctcagcatttgcttgtctgaaaagaattttatttttctccacttatgcagacttactattgttattttgttaattgttgtatttgcttcttgtatctttgttcctcattttctctttttctgtctttgtgtctttgttgtacttatcttggtatgcttttacttctttctcatttgttttgtgtacttacgcaaacgtattcttggggttaccttggggattatataaaacctctaaaagatacaacaatgtattttaatctggtaaaaaatgaacttcaggccaggtgtcgtggctcacacctatattcccagcactttgggaggccgaggcaggcagatcacaagatcaagagatcgagaccaccctggccaatatggtgaaaccctatctctactaaaaatacaaaaattagctgggcatggtggtgcacacctgtagtcccagctactcgggaggctgaggcaagagaatcacttgaacccaggaggcggatgttgccgtgagctaagattgcaccatccagcctggcgacagagtgagactccatatcaaaagaaaaaaaaaaaaaaaagaacttcagttgcatccaaaaattttttctcattatatctgccttcaaatttgtcattgatgttgctaattgtatattttatgttgtatatttgctaacaaatgtttataatgatttctattcttgtacctttcaaattttagagaataattaatattttttgcactattattataatgctaagaaattccatttttgtgtatgtgcattttttttcccagagaataatgtcttttatatgatgtgttgttttgttgaatcatgttattttcagtagcagcaacggttttcagcatcttttatatgtaaggcatatgaaaagccaatgtactttttcagtatttggttatttttaaaggttttttttctttttacttggaaggacagatatgctgatggtattattctcactttatagctatttttttcaggactttgactatatcacacagtttccttctggcctgcaaagtttttgttgacagttcaccggctatctcataagactatgcttgtaaatgacatgtcgtttttatcttgcagctccattctcttcttgtctgtgactttcgaaattgtgcttatatatgtgtttgttataaatatctttatgtgtatcctagtgtatttgttgagcttcttcattttgacattattttttctttcagaattttttagttatattttcctttacaatttctgtttttggatattttaaatatttttgttattctcattttttctgattttctatagttgtctgtgtccttattttactcattgagtattcaatttattttaaatttttaaaattaatgtatacatcttttttatggtttctttctgaaaatcttataattttggtggagcgattttgccctattttgtattcattgtaatctttgattaatatttggacattaaatatagctacctgtcacattgtttataatgtagctttgtcctggcatagtctgaaaacaattatcttggtttgagatcctgtgagactctcaaacatgttctttgaatgtgtcttgtctaaaattttgtgtttattttttagttaaaggagtttctgtttcatcttaatcagcagtcatttgctgtatctgttccctgtctgtggtactgcagtctctctgttgctgtaacatttacctttggtctcagcagaagtaaactgtaattccaaaatataccaccatttctttcagcactttatgttatgggagaccagtttctggaagggcccctagaagcaagtaatatagatgtatgtgccagtgttttacttgtttattaaaaaagaaacgaaaagttagcaatttactttgaaaggcactatgttgtattgttgagtaggaagaactgtgttgggtaaatgtaacagacttttctttttcttctgtgtctttgcattcctgtgtactcacctgtgtgctcacctggggaactttacacacttgtttataagttgtcctcaaatatattttggtcagtatatttttattagatttatatgtctatgaaggatttagggcctatggtattttattatggcatcttgtttatgtagtttgtataatgtaggttagatttgtaaagtatgtttatcagagtctagtaagttgaataatttgttgtttgtatttctttcagctatgtgttcttattttaccaaagacctttggccagagcaagacataaaagattcttttcaacaagtaatactgagaagatatggcaaatgtgaacatgagaatttacagttaagaaaaggctccgcaagtgtagatgagtataaggtgcacaaagaaggttataatgagctaaaccagtgtttgacaactacccagagcaaaatatttccatgtgataaatatgtgaaagtctttcataaatttttaaatgcaaatagacataagacaagacatactggaaagaaacctttcaaatgtaaaaaatgtggcaaatcattttgcatgcttttacacctaagtcaacataaaagaattcatattagagagaattcttaccaatgtgaagaatgtggcaaagcttttaaatggttctcaacccttactagacacaagagaattcatactggagagaaacccttcaaatgtgaagaatgtggcaaagcttttaagcagtcctcaacccttactacacataagataattcatactggggagaaaccatatagatgtgaagaatgtggcaaagccttcaaccggtcctcacaccttactacacataagataattcatactggagagaagccctacaaatgtgaagaatgtggcaaagcttttaaccagtcttcaacccttagtacacataagttcattcatgctggagagaaaccctacaaatgtgaggaatgtgacaaagcttttaatcgattctcataccttactaaacataagataattcatactggagaaaaatcttacaaatgtgaagaatgtggcaaaggctttaattggtcctcaacccttactaaacataaaagaattcatactggagagaaaccctacaaatgtgaagtgtgtggcaaagcctttaatgagtcctcaaaccttactacacataagatgattcatactggagagaaaccctacaaatgtgaagaatgtggcaaagcttttaaccggtccccacaacttactgcacataagataattcatactggagagaaaccttacaaatgtgaagaatgtggcaaagcttttagccagtcatcaatccttactacacataagagaattcacactggagagaaaccctacaaatgtgaagaatgtggcaaagcttttaaccgatcctcaaatcttactaaacataagataattcatacaggagagaaatcttacaaatgtgaagaatgtggtaaagcctttaaccaatcctcaactcttactaaacataggaaaattcatactagacagaaaccctacaactgtgaagaatgtgacaatacatttaaccagtcctcaaaccttattaaacaaaataattcatactggagagaaactctacaaatgtcaagaatgtgggaaagcctttaagcagtcctcaactcttactaagcattaaatattggccgggtgcggtggcttatgcaaaatggctcccagcattttgggaggctgaggtgggtggatcacaaggtcaagagatcgagaccatcctggccaacatggtgaaaccctgtctctactaaaaatacaaaaattatctgggtgtggtggcacgtgcctgtattcccatctactcgggaggcttaggcaggataatcacttgaacctgggaggtggaagttgcagtgagccaagattgtaccactgcactccagtttggcaacagagtgagactccgtctcaaaaaaaatttatactgtacaaaaaccccacaagtgtgaaaaacatggcaaagcctttaagaagccctcaattcttaacagacataagataatttatactggagagaaactctacaaatcagaaagatgtgactacttttgacaacgcctcaaacttttctaaccataaaagtaattatactggtgagaaatcctagaaatctgaagagtgagataaagcctttaaatggttgtcacacttcattgtaggtaagataattcatactggagaaaacgcctacatgtgtgaacaatatggcaaaacttaatgctcacactttattgctaggaaagcatttatacttgagataaattatacaaatataaagactgtgaaaaagccatcattatctgctcacattttactcaacacagagagttcctgcttaataaaagcattataagtgcaattactgtcaaaagatctttcagaaaatataagcttttttagtgaagagtatttattttgaagttgaacatcacaaatataaaaagggttgtagtgcctttacttgtatcacagatctttttgtagacattttcttctagaggaaaactctgaagcagttgatcaaactttgttcaacatcagggaatttatattgaaaaattgtgcaaatataataaatttggaaaaacaatttttcaaaaactacagcttagaaatcaacagttatactagaatatattttttccagatgcagtaaaagtaaaatatttaatccataattaagtctatgcaaatatcagagaatttatggtagaaatatataaggtactgacacttcagatatactaaatcagagtgctaagtatagaaaatctgaaactaaagttggtagaaaagttatttgtatagaactttaagaggatcagaaggttttttgcagagttataattacattcaaagtatactttatttcttgaaaaatattacagattttttgaaaattgaataatgtcatcattcaactctgaaattatttcctgttgtttcttcattcctattggattcacatgtgaaagcatggggttaattgttgctacatcaaagagagagattcttttgtttgtttgttcgtttgttttttgagactgagtttcactctttcgcccaggctggagtgcattggcatgatctcagctcactacaacctctgccttctggtttcaagcaactcttctgcctcagcatcccaagtagctgggataacaggtgccagccaccatgcccagctaatttgtgtatttctagtagagatggggtttcaccatattggccaagctggtcttgaactcctgacctcatgtgatccgcccgcctcagcctcccaaagtgctgggattacaggcttgagccaccacgcccagcctgtagcatattttaataggagaatacaatatataatagtagcagggttaagtaaggcatccatcatctgtagcatttctcctttgttttacaaacaatccaattctacactttaaaaaaaaatttttaaatgtacaattaaatttttatttaccacagtgttatttttatcgtcataataaaaattatatacgagtataaatgaaattcatttctaaattcttaataaatattttctcatgccaggtgtggtggctcacgtctgtaatcccagcactttgacaggctgagcgagggagtggatcttgaggtcagcagttcgagaccagcatggccaatatggagaaatcccgtctctactaaaaatacaaaaattagccaggcgtggtggcatgtgcctgtaatcccagctactcaggaggctgaggcaggagaatcgcttgaacctgggaggtggaggttgcaatgagccaagatcaccccactgcactccagcctgggcaacagagcgagactccatctcaaaaagtaaaatatattttcaaattttctatatatttttctttgaacatgtggcctgtctgcctgcaaacatatacagacttttagttttgattcatatagagttaaatacatgttagtctaaagacaaatcttaggtgtaagaaaattatggagttaagtatgtgtgtgtgagtatgagtttgtacatattttcagaaggaaagaatgatacgggaacaaaaatcattttaatatggtgactactataaaactaaaaacctaaaaaatgctgaaagcaaatgtatactttttggtttgtattgaatttattactgtacagtctatgacttagagttctgaatcttcccaagcaaattctctgtatatacttgcctggtactcatgctagacccatactttttttgtttcttacattttttttgttttatattttatgaagtattcattatgtgagctggtctgcgattataagaatttttatgaaatttagtgcacacaaaataatctttagatgtaattccaaaagtagtgtattaagttacattttatttagttagagcactccattttgttcttttaagaggagaacaatatataggttttctttagtgatttgttcctttcactttttataattgacataagcatatttattgagtcaatttgttcagctaagtactagggaggcttcattagtcatgaggatgtttttatatataaatgtagcaaacatatattacagttttcactgtgtaatagattatccataataattcataaatattcctgctgaagttagtttgtaacttcaagtcaaagatgaaaaatatcaatggtgaagattgattgttcatatagagaggacattttttttccagactgtaaaactgaatcttgttgaatttaaagagaaattctggcagaggcagatgaatcacctgaggtcaggagtttgagaccagcctgatgaatatggtgaaacccagtctctactaaaactacaaaaatagccaggcatggtggtgggtgcctgtaatcccactcgggaggctgagtcaggagaattgcttgaacccggaggtgaagattggagtaagccaagattgtgccgttgcactacagcctgggcgacagagcgagactccatataaaaaaaaaaaaaaaaaaaaaagagctgggcgtggtggctcacgcctgtaatcccagcactttgggaggccaaggtgggcgaatcacttgaggtcgggagtttgagaccaggtgaccaacatggagaaactccatctctactaaaaaatacaaaattagcccggtgtggtggcgcatgcctgtaatcccagctactcgggagactgaggcaggagaatcgcttgaacacgacaggtggaggttgcagtgtggcgagattgcaccattgcactccagtctgggcgacaagagggaaactccatctgaaaaaaaagagaaattcttttattttctacttctcttcagatttgtcttatgcattttccaactatgtatgcatcacagctattctttttctgagttatagctacagttttcttactgttgtcttcatgccatttcatttcacatggtactttgtagattttgatgaggaagttggtatttttagtgcacacaaaaattggttttaactgtagagtttgcttatcagaacagttaaaaggcagccaggtgtggctcacgcctgtaatcccagcactgagataggccaaggagggtggatcacttgaggtcaggagtttgagaccagcctgaccaacatggtgaaaccctgtgtctactaaaaatacaaatttagccacgcgtggtgacgcacgcctgtaatcccagctactcggaaggccgagggagcagaatcgcttgaacctgggaggtagaggttgcggtgagccgagactgggccactgcacttcagcctgggcaacaagagcgaaattctgtctaaaaaaaaaaaaaaaagataaaaggtgcaatactgtccacaggtaagataattaaattagtcagctttgtttttaaaagaaaaatcttactagattcttatacaaagtgtggcaaatataaaacttgcttgaaaatacagaaattaaatttttaagagagttaatggtaagtaaacaattttaaagttaattttctatgatatacttacagcacaacttatatttccatgcagaatcttttatttttaagtgtgagtgttaaaggttacaaaataatgaaatgacttcagtggatttaaaattttgaaaaataatgtcttttctatattgattttacaatttggagaaatttttcactcattttttatatattttttagtgggagaggtttagtctacagtttttatttttagtcaccaaactgtagccaactcttgggtcattttctctgaaaaacatttggagatcatgacagcgtttggattaaaacatttctgttactttgcatgcaaactagtttactgtgttcacagagtggccagtcatgggaccataagcaacacctgctctttgagtgtctttcataccgttaccatcagcaccagaaactccaggtgccccaagcttaaagtaaaaatcctaaagtacgttggctcctcccatgcaatgtgctgggtccaaaccatgctgttaaatatcagaagtttctatggttatgattaaaaaattaaatgacaataatagccccaaaactatatatttttgatactatttaaccaagattatcacaaagacacagtatttgacacattgttattcttctatgttttataaatattttaatgtgacaggtagaatctgtactttttctgtagaacgtaatattttgaagtatatatatagttaaattattatttctaggtaattaataatttatctcacattggtcagacatgatggctcatgcttgtaatcccagcaatttgggaggccgaggcaggcagatcacatgaggtcaggagttcgggaccagcctggcgaccatggggaaaccctgtctctactaaaaatacaaaataagcagcgtgtggtgacacatgcctgtaatccagctaccctggaggctaaggcaggaaaatggctcaaatctgggaggtggttgttgcagggagccgagattgcaccactgcactccagactgggggacagagtgactatcaaaaaaaaaaaaaactttacctcatatggtgaacatttttgttttgagaccacatgacactgtcatcatttttcaaaaatccaaatacattattatgaactatagtcaccatgttgtgcaataaatctcttgaacttatttcttccatttgactataattatgtattatttcacaaacatgtttccagccttccatttcttataaataacttgcatctgatggtcaccattttactctctacatcaatgggattaagttttttggaatccatgtgtaagtgaaattatgagacactaatctttctgtgccttgcttatcccaactaatacaatgtcctccaacttcatccatgtgattgagaataatagtttttgttttttttttaaggccaggagtggtggctcacacctgtaatcccagctctgggaggccaaggccagtggattgcttgagcccaggagtttgagaccagcctggacaacgtggaaaaaccccatctctactaaaaatacaaaaacaacaaaacaaaaacaaaaaacacctcagctgggtgtggtggtgcaggcctgtaatctcagctactccagaggctgaggcatgagaatcccttgaaccacagatgcagaggttgcagtgaactgagatcatgccactgcactccatcctgggcaacagagtgagactcggtctcaagagggaaaataaggcatttttctcatttaaataataaatagtattccattatgtatatcaaccacattgtctttatttactcattagatgttgaactgtttattctgtattttggctattgtgaaacaagtgctgcaaacagaagtgcaaatgtttctttattcttattttgttttggatatatacccagtagtgcgattgctgtattacctggtagtttttttgataaatctgtattttgtttttcgtaatggctatcctcatttacgttcacaccaacagtgtgcaaggattccgttttcttcacatctttaccaacacttttttctttttcttttaataagagttattctaacaggaatgagttgatatagggattttttttttggcttgtctttttgtgataatagtcaacattgagcatttaaaaatatatccgttggacatatgtatgacttttcttgaaaaatatttatttcagctatttccttttttttttttttctttttgagatggagttttgttcttgttgcccaggctggagtgcaatggcacaatctcggctcactgcaacccttgcctcccggatcaagtgattgtcctgcctcagcctctcaagtagctgggattacaggcaaatgccactgcgcccagctaattttgtatttttagtagagacggggtttttctatattggtcaggctggtctcgaacttctgacctctggtgcccacctcagcctcccaaagtgctgagattacaggcatgagccaccgcgtccggcctattatttttaataattttttattgttgtcattttaaatacacttttgatattaacctcttgtcacatgtataatttgcaaattttttctcccatgttctagttgtcacattctgttgattgtatcagattttgtccagcagctttttaatttgaagtgatctgacttatttttccttttgtgtcctgggatgtttaggttaaatcaaaaaacttgcggccaggcgcagtggctcacacctgtaatcccagcactttgggaggccgaggcaggtggatcacgaggtcagaagttcgagaccagcctgaccaacatggtgaaatcctgtctctactaaaaatacaaatattagccgggcgtggttgcacgtgtctataatctcagctactcaggaggctgaggcaggggaacggcttaaacccagaggcggaggttgtagtgagccaaggtcatgccactgcactccagccttggcaacagaatgaaactctgtctcaaaaaaaaaaaaaaatttgctgcccagaacaatgttatagggcttttgctctatattttggcagtagtagtttcagagtgtcaggccttacatttaagtactaatttatttcgagtttatttttacatatggtgtgagatgagggtctcaatttttatctctgcatgtggatataaagttttcttaattgaagattctgttctttccctttaaagtcacctgtatttaaaatcaactgtaaatacatggatatatttctgctgtttttttcttctgctccattgacctatgtctctgtttttattcaagtaccatactgttggttaccatagctatgtagtgtatttcaaagttagtcacttcttttgtcttgattgctttggctattcagggtcttttgtgataccatatgaattttagatatacttttaaaacttttctatgaagtatatcacgtatttcgatagaggttgcattatacctgtaggtcattttgtgtaatacaaatattaatgtcagttcatgaatagtccatttatgtattaatttctatttagaatgtaaggcgtttcaactttttggttaaatttatttcaaactatagttattgtagatgtaattgtttttgaatttcattttgggatagttattaatgtagagaaatgctgtgactttttgatggtgcttttgtattttgaaagtttaataaattttgtttatttatttatttattttgagatggagtctcggtctgtcacgcaggctcgagtgcagtggcacgatcttggctcactgcaacctctgcctccctggctgaagcggttctcctgcctcagcttcctaagtagctgaaactacaggcgcctcctactacacccagctaatttttttatttctatagagatggggtttccctacgttggccagactggtcttgaactcctgaccttgtgatccgcccacctcggcctcccaaagtgctggaattacaggcaggagtcactgcaccttgcctgtttataatttttaagatttactaaggtcttaggcttttttatacttcagattatgtatagggataaaagaaaattatacaggaataattccttttcctcaatttggatgcctttgatttttttctctaatttctttgtcttggatatttagtaccatgtttagtaagtctgactagagtgggcatccttgccttgttctagctcttagagtaaaagcttacaacatatccctgtttagtatgttgttagcagtttttttggttatatatggcatttattggctgaagtgcatttgttctatacctaattttttcagcgatttatcataagggaatgtcaaattctgtcaaacttctattgtgcatccatttttttctctttgcactctgcatatatttaagttttagagatgtgaaatcacaactaattctgcatacatacaaaaaaagtcagagactactatgaacatctctatgcctgcaaaatagaaaatttggagaaaataaataaactcctggaaacatacaactttccaggattaaaccaggaaggaacagaactcttgaacagggcaaaaatgtataaaatatataatgaaattgaattaataatttaaaaaacctaccaactataaggagccctggattatataaaatcacagccgaattttaacacatatacagagatgagctggtattacttctactgaatgtattactgaatgtattccaaaaaatccaggtggagttccaccctaactcattatataaaatctgtatcgctgcacgaggtggctcacgcctgtaatcccagcactttggaaggccgaggtgggcgggtcacctgaggtcgggagtttgagaccagcctgcccaacgtggtgaaaccccatctctgctaaaatacaaaattagccaggcgtggtggcatatgtctgtaatcccagctactcgggaggctgaggcaggaaaatcgcttgaacccgggaggtggaggttgcagtgagccgagatcgcgccattgcactccagcctaggcaatgagtgaaactccatctcaaaataaattaattaataaaataaaaacctgtgtcatcttgataccgaagtctagtgaagacaacaacaacaaaactataggccaatattttgggtgaacattgaaacaaaaatcctccatgaaataatagcaagctgagttcacaggcaaatcaaaaagttattttgccacacttgtgaactttatatcacatgtgcaaggatgtttcatcatatacaagtcaataagtgtgtttcaccatacaattaaaagcaaaaatttatatgattaacacaatagatgcagaaaaagcattcaagaaaatccagtattcatttatgaaaatattctctaagcaatgatgaaacatacctcacaataataagagccatctatgacaaatcctcagctaacatactgaacagacaaaaggggcatgcatttctcattagaaaaaaaataagactatctaaacaattctatttaacatagttctggaagtgctggataaatctaacaaaatgaaaaaataaatggcatccaaataggaaaagaagaagtgaaattaccttcactcatgatataattctctacctagaaaactttaaggattttaccaaaagactcctaaggttaaaaatgacttcagcaaagtctcaggatacaaaattgatatacaaaaatgaatagcattgccttacaccaataacattcaagctgagaacaaaatcaagaacagttttctttacaatagccataaacaaaaaataatatacttagaaatacatcaaaccagggaggtaaaatatctctacaagaactagaaaacattactgaaagtaatcagagacaattcaaataaaaaagctttctatgctcatggatttgaagaatgaatagaaaatgtctatgctgcctagagcagcctacaaaataagtttttgtttttttatcaaaatgtcgattactttttttttttttttgagacagtgttgctctgtggcctaggctggagtgcagtggtgcgatcttggctcactgtaacctccacctcctgggttcaagtgagtctcctacctcagcctcccaagtagctgggattacaggtgcccaccagcacacctggctaatttttatgtttttagtagagatcgagttttgctgtgttggccaggctggtctcaaactcccggcgtcccaaagtgctgggattacaggtgcgacccaccatgcctggcccaaccccatattatttctggtaacaaagcacagaaacatgatttctcgaattttgctaggattttaatttacaaaagaaaggtgaatgccattaaaaggtgtttaatacactcccaccagaaacaagaggcaaggcaggccctgggggcctcacaaaggcggtcttatgcaagggtgagaaagcagagttatcagggaggtgggactattgctttatgaacgtgatgattggaagcaaaaacgtggggctttttcctattgaatacaaagtaaaataatgaatgctggtgtcagtggttgggaataacaacatttgcaggctcatgagagctgcctgacaaaaagcgtgtaaacaacagtgattgctcctgtggccctgtgattcagcaggtttatggagcagttaagaatcgcagatgtcaaatggccaacacagaatctaacgacatgcttaatacaaattattattagtagaaatgctgaattgcttcatttctgcaatttctgctgcttcttaagatgcttttaatgaataaaatctgccttaaaatttgatacctggtaacttctctctgtgagttttgaattggctgatgtaaccaaaatgccagctcttgccatctaactaccattaaaaggaacttctaaagctccgaagtggtcaacagtttcacttccaacttttttaaaagatacacaattttctaaaaaatttttctttatgggcgattgaatagttgggctttggctaattcctcattagcaatagaattatgtatattttgcaaactctaatacagaacacttaatgtatcagacaaccatgattatgatgtatatacctggtataaacaatcttttttgcatattgaattctgcatttttttcttccttgatacgtatgagattcaccagtaccagtttttctcttgtggtggcatatagttgattgtcatttgcattatctattaaaaacctgtggcagctcatggtattattgaccatatgttctagtgtcttcttgcagatttaaatattttattgcagtgtaaagtttaatatttagatgtgtgatacatctttggataatctgtaattaaattgatcttttgtaatggtgatagtgattagcacacactgaaaatccagcaaagcaattatttttctctttttaactggaaatcatattcgtaagttgtggtagatattatcatcagtgtattcatgattcgatttatattttgtgttatctggttataaattttatatagcattcaatttgacaaaatataaatctatttgatttgaatttaatggtgtgtgtgtgtgtgtgtgtgtgtgtgtgtacttccttgaactttaggaaattctacaaatcttatacagatatgaatgtatcaggcttatattttttgcaaggctatatatacatttcttctgtttattaaaatactggaattggtgttatgtagatatagttgtagatatcagaataaaaatggaatgttgtgaaaattacaacttaataaatatttatggcaaataaatacaagataaaaattatacatctttacaagatagttatttacaattgcttagagcttacctgtccagccaaggcctatcttcttcaagactgtgctgaggcctggcacggtggctaatgcctgtaatcccagcactttgggagaccaaggcaggtggatcacctgaggtcaggagttccagatcagcctggccaacatggcgaaacccagtctctactaaaataaataaataaataaataaattagccaggcatggtggtgtgtgcctgtaatcccagctacccagaaggctgaggcaggagaatcactggaacccagaggacagaggctgcagtgagccaagattgcaccactgcactttagcctgggtgacagagcaagactatgtctcaaaaacaataataaaaagattgtgctgaaattgcacctgcttggttacagtctctactggggagaaataaccctgaccgagaatgatcaaaaaaagaataaatttttggcagaaaaattctctgtgtaaaaaaacagagttgtgtaaaagaaaattatgttcagagaaaaacaaactgaccaattttaccacagttatttttaagaaaataaatgcttcaaagtcaaattaaatttatttaaaaattgcaaatatagtggtgaatgaaattaaaggtctcggtcttcacagagtttacattgtaaggtttgaaaaataaagacaatttgagaataaataattcttcatataatgctggtagcataggtaagttggtactacatcctggaagagggctccccaatgcctatacaagctgaagatacaaatacactttagttatatttgtggttaaatatctacatagttacaaaaatttttcttttaaaaatgcacaagactgtttacagaagcactgaccaatctggaaaatcaccaaaatgttcataaaaagtggaataaagaaattgtagtgtatttatataatggaacattgtagatcaatgaatatagaaagcacaacttgcaatattcacaactttcaaagcaaagcacaactacaggcagcaacagagatctatctcacaaacaatgttgagcagaataagctagccaaaaatgagaatttactgtattaatccatttatttaaagttcaaaaacaggcaaaactcatttattgtataaatagctagaatataagttgctcttagaggaacagtgattgaaaaggagaataaaatgtagcgggatttttaaggaatcagagagaccgatggggtacaggaggatatttattaattatttaggtgcaccggcccagtcagattaacatctgatggactgagccctaaacaaagagttaagttaccttttaagcattttgtggggcaaggggagatctgtgcatggagaagcgtactacagaagcaagaaacaaagacagttattcaattgagacatgcattacatcatttcttacttttcaaggagaaacatgttttgcaacttgagtttatctgtctagtgaccttgcagctgcacagctagggaaagagagtcttcacaatgcttgggaaaggagaagagataaggctcactagccacagaaaaacaggcagttaattcttaaaggactccagctctttctctttctctgagggaaatgggttttgttacatacaactgagtttctgcttatacactctaatttcttttaattcctgttccgttccccactttggtgcatttttataacagaggtgttaatagaaagcaccactatttgccaccttctcacagagctgagctgctccttctggtagcggctgatattttgttaataccatcaactgcacggtagtgtgtcgggttactattgcctctatagttgactgaatactcataataaacaggggtaaaaggcaagggaggatgaggcagacgccaagaataagcaagaacccaccaatgaggattttgaatcctccaaaggttgagaaccatcctccaaacaaggaatctggggaccatccagaccaagtctgaactggaacatgggccagcctgcgcattgtagctatgatttccatgaccgcttggtcattatcatcaatttctaggcaacagttggttcaattaaattttccacatactcctccttctgaggctaagaggtaatctaaagccaatctattatgatatatagcatttctcatttgttttgcttgtattgccaataaatctagtgcccttgatgtttcattggttataatttctaggactgcctgcaaccttatgatgaggttgagcatatagattgggttgtggtacccctgtgacccatcttgcgcccaggtagctggcccataatatttcgtgattcaggccattcattttctttccagtttcctatgtccacatcgtttttgatatttgtgtctatttttgtgattatgcttcttctagttcttcctttatttttatcataaactggatatcctaagagttcctgttgctttagaggaattagaaggatggcttgactgttcctaacacacatgcccctgtccatttagctagcagtagctgatatgcctgtgctccacagatccaatacaggccagagggtgcctttcaagcatttgcagcctctagctgatgccaagagtggcttatagtagacaatcaagagaaagggtttggatctggtaagtaggagtcagtctgggtgtttcttcatagttttgtttttagtctcatcataatactgttgccctaggcaggttgtttctcctactgcctctgtgaaagcctttccccattgagcgatacaataccttccaattatggaggtttttaacaaccagacactggcaaaggctgttggttcactggcagggttaagcgaagtgaagttatcttatggtattaattattttgcctcccatggccactagtcccccatattatttcctccacatacacagcatgaggaaattcctaagctgccagctatgttttcagctagttgagcaaataagtgttttgttgatgggggaaactcaggcactgtctgatcaaaatgcttatagaatgacttatgggcctggaattgtgaggttggatgcatttgagtccatctagtctttttgacaattagtagtggaattccaaggcctgctctttttctatgaactcataatagtgctgtctgtcctgtagaacaaaaaggtagctctggctttaagacagtaaaatttaaaggattgcatgttcttgtcttacaatctggtttgtttgacataccacttagcagagcagtccttcctgaataaaggtgttggagctgtatttgtgtagaccatggaatgttacagtctgagcatctgatttgtggttctccatacagatgtttaggactgctgctaagcctctcttgtgtcaaaccactgcagactccttctgttttttttaggatttgaacatatgcagcatggcaggcatcaaagtacaaggaaataggctctttataggagggaggggcttctttggttcaagctataagctctccttctttttctccctctgatttaatatgtacctcaaaccagaattcatagggtaagagcttagggtcataacataaatatagctgattatttcctgggtcacagactgaataggtggtctggttgtatgtgcaggttcctaacttggttcctgtacattcatagtaggtatggtacagtagagttttaactatggtattcgttacccaggtagtatgtacacagtgtgagcatccttctagagatttctccccttttagtataggcagaaatggtaacaacatcagtgtatgtaatagaaacatgcttatactacacatgtgcatggcaaaccttcctctgggcatagatatttgctgtaataacataacaacagaacaatcagtattgacagaattataactaggcttataaattgtatccacatttacttatctggagatggtcctcttagcttcagctgtgcatagactagtcagcttctgggatgtgactagagtagagcttgcaggatcctcaagcttcagccacgcgtagactgaccagcttccactgtgatcagagcagggcagttgtccttcttactggtggttgcgtttcgccgtaggactattcaggcggggtgatctgtgtcttgttggctaattcattggtcattgtcaggagtcactgctgccactggtttcggctggctatggtgaatcgaaggtgtgacacctgcgactttaacagcagtgggagtagacataattacaatatggggcccatcccataagggccccagggttgttggattccaccttttaacccagacagagtctcctggcttatgtggatgcactacatctcttagacttataagtatcctttcccttacccagccttttacctcctgcattgccactcctcaagcctgcatctgtgttctaagggttagctctcctaactcctttaaatgccctctaatttgattaatgattgcgggtggccttctgaacaatatttcatagggcaagtacccagtttgttttgtaggtgtacacctcacctggaggaggaccatgggcaagacctgatcccatcataagtgagtttactggcaaaattttttagtagctgtttgagtgtctgattcatccgttccaccttctctgaactctttggtcagtaggctgtgtgcaatttccatttgatctttaaaagttgagtcaactgttgtactacttctgccgcaaatgcaggaccattgtctgatcctagggttaaaggcaacccaaaccttgatattgatgtcttttagtagcacctttgtcacctcttgtgccttttcagttctgatggggaaggcctcaactcaccccgagaaggtgaaacaaacactagcatataccagtaacctcctgctcaaggcaactcggtaaggtctacaagcaggttctcacaaggcacagctcccatttcctgaatttctgggggtcgagtaggtccttgttttggattagatattgttcgcaggatagacattgttcgcaaacagcacgggtgatggcagagagccgtggcacatagaagtgttgacctatcaaagtctctagggccgtgcttccagcatgtgttccttgatggatctgcttcacaaaccttggggctattgtctctgggacagctagcctcccatcagagaacagccaccatccacctttaatatattttcctgtttcctggccaaaccaagctttttcaattgaagagtaattgggtacctctggcaaagggggctctacaaagagaggcattgctagagttatttcttcaggtaaaaccttgctcattgctgcccacctaacttcttggtctgccctcctgttgccctgtgcctcatagcttttcctaatttggtgtcctttgcaatgaatgagagccaccttctctggagcccatatggcttctaataattgcaaaatttcctctttattttgtatttcttttccttcagtagtcagaagtcctctctattgtatattgccccatgggtgtgcagggttgcaaaagcacagtttgagtcagtatatatgtttactttttccccttggccaataacagtgctctggataatgctattattaattcagccttctgagcagaagtcccagaagttaaggcttgagcctcgaccaccgagcgttgggtcactactgtataccctgcatatcgcaccccatttgttatgaaactgctaccatcagtgaagtattcaacatctgggctctccaagggggtatcccttagttcttcctagctcgagaacattttgtccactgaatacagtgcaacagtggggaaggtcctgccagcagtgaggcaacccaccattcttcaaagtgggctcctccacaggcagcagggtagctgggttcaagaaatttacagtctgtagtgttatctggaaattttacacagaaaactttgacactttagcattctaaagttggacaggcaacgatgtcctctttggtccattaaggagactacagcatgtggcaccccaatttttaacttctgtcctagggctagcttgttggcatcttctatgaggattgcagtagctgccaatgccctgaggcagtggtgccaacctaaggccacctagtccagtcttttggataagtatgctaccagccaatgtaaagagcccaacaactgagttaagactccgactgccattccctttcgttcatccacatacaaaagaagggtttttcttacatctggcaacccacatactgaggcctggatgagagcttcctttatatccttgaaggtcttttcttgttccttttcccataggaggggctctctttccctacctctggtagcctcatgtaagggccttgctataagggagaagtttgaaatccagattcggcaaaatctcaccacccctagaaattccctgacctgctgccgccttgtaactgggtggacaatgcacatacagcctccttgcgtgcacttccaagcctgcattggccttgggatactatgaatcctagatatgcaacctcccaaaaacagacttctgccttgtccttgaacactttataaccagcttcacacagcaggtcgaagcctctctgttccttggaggcattcctccctcttaggggcagttaatagcaagtcatcaatgtattgtaatagcacagaattgtcactagacggcgcaatagcctcaaggtcggtagccaaagcctccttgaagatagtgggagaattcttaaacccttgtggcagccttctccgggtatactgcgattgcccccactggaaggcaaatataggctgactttggggaacaagcctcaagcaaaagaaagcatcctttaagtccagacatgtgaaccccgcggcctcagcaggaatatgtcacaacattgtgtatgggttgggtactgtggcatggatagtggcagtggtcttgtttaccacctggaggtcctacactggcctgtattcaccatttggcttgagcacgggcagcagaggagtattccaagaggacttgtatttcactataatctcatgttcatagagctgatttacatgttttgttatgccttcagttgcctctctgggtaatgggtattaacggactcataccagggtagcatgagggttaagctctactaccaccgggggtctgtttagaacaagtccgggggggttgtcctcagcccatacacctggtaccttgaaaagcattccccacgtattgtgtaggtccagctccagcagcctcctggtacacagttcatagagccgccattcctcagctattaggagagctagagtcaataccattgcctttggcttccctacctccagggtcatattcccattaggtgtaaaggaaatttgtgcctgtatagtttctggagtaagtctctccccaacaagggcactggacaatttggcatatatagaaactcatgctgcacttcttgtcctccaataacacatctcctggatttgcaaaaaggtcccttttctttggccccagtagcccttacaatagtagcacagttctttgtgggggggctaattgggtgagttaccacagagaaatcagctctagtgttgaccaaaaaatccattgatcagccccctatttccatagaaaccatagccaccccccgaccccagggcctaaaaagatggaacgcggtctctcagtcctcaaaattcttggcccctgctaagccaatcagatcaggatctgcctttgaggcaccattactagcaacagaacgccgcactcgggtgttagactattgaccatcatctccatcctttgcctttttgggacactcatctttccagtggcctatttgcctgcactttgcacattggttcctgtccaaaggggacaggctttcctctcccagtcatgtctgccctcttcctcagcctctgctttgaccacgccctctagcaaatccaggtttactttctgctagtgaagcagctgtaaattgaaccgtgtctttatttctgtttctggtttttctttcttcctttctctctgcctcttcttcccagtttatgtatactttgtttgctatttccaggagttcactagtatttttccctgcaaagccttccagctgctgaagcttttgtcttatgtctccctgtgcttgcctgacaaaggtcatatttatcatgtgttggttttcaggagcctttggaataattggagtgtacagcctatatgcctcacaaagcctttcaaagaatgcacttgggctttcatcaggcttttggcgcatttctgacattttactcatattcattgcctgccttcctcctgcttttatcccattcaggagtgcctttctatatagccgcagccattccatgtcccttgcctcatttgggtcccagttagggtcctcatttgggtaacgctccaaggcaaactggcatgggttagggatggcctctggggcttccccttctaaccagctgagagctgcctgattaactctcctacacttctctgtattaaataaagttagcaaaagctgttgacaatccggccaggtcaggttatgtgttataataaaagcattcaccaaatcaatgagagcctgaggcttttctgtacaggaggggtatgctgtttccaatttaagagatcagtagtggagaaaggctgataaacataaagcctagggttaccttgtatctgcccctggtcatcataaacttgtgtccttgtctcttgaattggcatctgcaaagcccatggtaggccttagtggaggcacctagctgcctcaccctgtccatcttccctgtttttatctaataggggcttctttttctctgggtgggggagactgagcctcactttcctctgaatccgactctccagatgctcctgactctgcctcctgccttactctggccaaagatgggtagactggcacatatgggggtggacattccctttcctcaggtgggacctgaagaactggtttcagctgaggctttggggattccttttcctaggagacactagaagctttaggtttctctgttttactttggttgtgctgcctgagccactaatgccttgcaatatccctctaggcagggctgtcaccacttggggcgagtttgcaccacattgagccaagagtctatatagggaaactggtctgggtatcctggttgtcctgcaactccagtgaccaccttaaacacacggccaattaattccctgtctattgtacctttagagggccaccccatattgaaagcaggcccatctatctcacagtatgtccttaacctttgagcaacaagtttcatcccataatcacctctaaatccttttttaaaattctttatcatgcactccaaaggagttggtttcaatgctttccctctcatttcctcccttgcagtgcactttcactctcactttcactcacaggtccaccagaccaggtcctattatgagagttttggatgctgcttagtcaggaacatgccttcccctgtcacagcctgctgcagctgtgaagctggtcctttcagccgtatgcagcatcctaggtctgatgtcccctgcactcatgtcagagcacacagcccatgctaagggatctctgcctccccatgtcactccccgcactggcctctcctgagaccatctctttcacacactttcacacacctcccctgccccaagattcctcactggatgaaactagcctgtctcatgtcctgggtgagcctctctcatgtcctgggtatgttcacgtgcaccctcaacactcccagttggggtggcaagccactcttgccaccctgccagcaagctctaccttgctgcacttgctgctctattggcccatttcctcatttttttccagttccagtgttagtggggacttgaggtgcatccaaattggcaagccactcctgatgcccccagccactctgggttggattagtgttcattctccgggaggtgatcaagctccccttcatcctcatgggatgggctttgctgccttgggcactttctctttactgcagttcctgaagtgctggtatcatcctgcagccccattcccagttccattgcactgccaggcagggtgtcagaatatggggagagctggtttctatccagttgaagctcccctgtggtgtgccttggatgctgggtctctcctagccccagagctctagtctcacaggcaaaggagacagtaaatctgtcatctccaaccccaggcaagccccccacccccaagaaatgtagtgggatttttaaggaatcagagagaccattggggttcaggaggatattcattaattatttaggtgcaccagccgtcggattaacatccaaaggactgagccctgaacaaagagttaagttaccttttaagcatttagtggggtggggggagatctctgcagagggaagcatactacagaagtgagaaacaaagccagttattcaattgaggtatgcattacatcatttcttacttttcaaggagaaacatgttttgtgacttgagtttgtctgtctagtgaccttgcagctgcacagcaagggaatcagggtcttcacaatgcttgggaaaggaggagagataaggctcactaaccactgaaaaacaggcagttaatttttaaaggactccagctctttctgtttctcaggaggaattgggttttcttacatacaactgagtttctgcttacacactctttaatttcttttaattcctgttccaaaaacagggggagtgcccaggttgttcacactcttccatcactgcatgctgggttcctggtatatgcattgtgtaaacattcatcaagctgttcttttataatgtatggatattttgtgtgaaattaaaaacatacctttttgattttttatttatccttttttatttcttcttcagtcactttttgacacatacttttctggaaaaataattttatctaaatttttaaatttaataacataaaattgtttaaaacaatatcatgtttaaatatttttattattttttttttgagatggagtcttgctctgtaacccaggctggagtgcagtggcacaatctcggctcactgctacctctgcctcccaggttcaagcaattctcctgcctcagcctccaaagtagctgggattacaggtgcatgccaccacgcccaactaatttttgtatttttagtaaagatggggttttgccatgttggctaggatgttctcaatctcttgacctcgtgatccacctgcctcatcctcccaaagtgctgggattgcaggcatgagccaacgtgccttaatatagaaggtatctaaaataaactacagcaaatgtgcatgataaactattgagatcataaatattataaggatgctactgtcaagatttttattaaacattggatttatggtcccagccaatgcattaaaatgagatcagttttacaactatactttaaagtataacaagtcaataatctagtacctaaacaattggttctacctggatagattggattcccacacagcaactgacacgacaatttttcacatagattcagaatttaaaacttttaggagaaaatacaagataatattgttgtgataactgtgggtgtaaagcaatttcttaaacatggcacaatataaaaacttgcataaacatatttataaattagatgaaattttaaaaacttttgattatcaagaacttagaaaaacatgtttgaataaagatggtggaaaggcaaatcataaccaagaaaaaatatgtaaaaaacacatattacaaaaattagtatttagaaaatatgcactacagaatatgtattaatatacaaagaaatgaaatacattaaaaatggacagatggcacatcttaaaacacatatgaccaattaacctctgaaaaataccaatttatttagtgactatggaaatgctaattaaaactctaaattatatacttttctgattctccattttgtcaaaaaatatgtctagtaattccaagagttgataaaaataaagtaattggaattcacaaataaccactggcagtagaattcgtttataaattgatgtatattcacactgcggcagtaaaaatggacaactatagctatgcaaagcaacatggaaaaatagaaacaattgtaaataaaaaagcaagtcacagatgaaaacttgtagaattgatctaaagtcaaaaaacaagcaacactgaaacgtatattgtttatagataaaattgcataaagtaggccaggcaccatggctcacgcctgtaatcccagcactttgggaggccaaggtgggtgaatcacaaggtcaagagatcgagaccgtctggccagcatggtgaaaccccgtctctactaaaattacaaaaattagctggacatggtgttgcatgcctgtagtcccagctactcgggaggctgaagcaggagaattgcttgaacccagaagatggaggttgcagtgagctgagatcatgccactgcactccagcctggcaactgagcaagactctgtcaaaaaaaaattgcttaaaataaacgacaatatgaaattcagatactggtcacttttgggttaggaggttgttttttgtttgtttgtttgtttgagatggaatttcactcttgttgcccaggctcaagtgcaatggcacaatctcagctcactgtaacctatgcctcctgggttcaagtgattctcctgcctcagcctcccgagtagctggtattacaggcatatgccaccacacctggctaattttgtatttttagtagagatggggtatctccatgatcatcaggctggtcttgaactcctgaccttaggttatctgcctccctcagcctcccaaagtgctgggattacaggcatgagctactgtgcccagccaggttaggaggtttataggaaaattcagaggtatccacttctcaggaatgcgtgatgattttatgaagttacactgaaagtttcatgagagtagagaccaatactttcttttctattttattttctaaggctgccaaaaggatagcatattgtgtgtggtcaacacacatttatcagttaaaagaatgaatacatacatattctttgtaaaatgtgaaactatgcaaatcaagattttattatttttatttcctatagttaacagaatcaaatagaaaataataaagtataaaattcagaaagcactattgaaagtttaatgttaacctagcacttgcaggtaaaaatatagcaaaatttttagtttccacatttgtgaccattataattacatcaaaattgccccatgaggaaagaacatgaaatctgacttcagtagagcacaatttaagaggaaaaagctgaaataaaaagaaaaagaaaagaaaaatataaaaatttgattgggtcaaatctctaagttattctccataatttttttttttttagaaaataatttttacctctgcttgtgcagagtgaggctggctggtggaacctaggcccctctgtcccccccaggtggcagtggctgatctctggtcaggcatgaggggtgcctccatgtatgagttcagtcagggtgtggaaaaacttatagagaaagatgcaaaccttcttggaaggccaggaggtttttgcaaatcttcaggaaggaatgagccaaaggtggctgttctttcccagcggtaattagacagatgtagatacaaaggaatgtaggggagcttatctaaagaccttgtttgctcatgttgtcctaagaccgacctttgatcatttgtgggcagaactgctctctactgggggattgacaatgttaattacccactaatagtgtttactcgagacttttgtcatttaatctgtaataaatacatgtaaacttcaccggcttatggaggtgggtgctgctcattctgttagcacagcctcttagctgcagtgacaggcaaaatatctgtgtcagtgtacgtctttcatccatcactgtgtcagggtctgtgggtcagacctggcactgccacgcactgggcctgaggctgcccagcccagctgctcctcattcccctggactcttccatggtatctccaagcccctgcatcatcctatctgtctctctgatgaaaggtgaggtggcagcacaaagatgatggggaaactgccccacatgccgaggaaagcttgcccagctgcacgaaatgctctggttgatgggtttctgcgcaccaagctgggccatgaccaagggttagagtggaggcgtaccagggtgagggtgctttggctgctgcaggagcttccctgctggcaggaggcagcaatagccatggtcattgaaaacaaggctctgctgataaatctcagacaccaggatcagaagaaaccagagaaactgctggagagcttgagccaaatggacagactgttggagcagctgagggtgaagctgcatgaacatcaccaaggatagaaatggaaatgatgaaggagtctgggaaataaatgatagaagataaaatacagccgtgaacatggtaaggtgatgacgattctggtccattggatcccaccatctccaaggcagtaaatctcatcacagtcaccacccagcaagttgccaccacagcattttctgtttgttcctaaataaataaaggtgattctcatcacaagggcaaatacaaatagtggtctattatgtttttaactaaactgtaggggtttcatttactttttctaagttctcataattttgaaaatgcggttgtcatatatatggcttaagaagtttttgataggctaacgttacttgaattgttcaaaaaccactatattttaaattaagaagaataaacaatgtatttgttttatatatttaaagcttagagtcacaaataatgctcctgtttatgatttgaaaactttaaagtttggttttccatctgcatgtacagaaaacattgcatcacaccaaaacatgtgttttttaaagtggcagtcataattcctgtctgtctggatatattttggacttttctatgttaagcataacataagaaagaaatttcattagccgcgcatgtaggcttacgcctgtaatctcagcactttgggaggctgcagcaggtgcattgtctcaggtcaggagtttgagaccagcctggccatcataatgaaatcccgtctctactaaaaatacaaaaaattagctggacatggtggcagcacctgtaatcccagctactcaggagggtgagtcaggagaatcgcttgaacccgggaggcgtaagttgcagtgagccgagatcgtgccattgcgctcgagcctgggcaacaagaacaaaactccatctcaaaaaagaaaaagaaaaaagaatttcattttgttttaggtaatctaagattgttgtacacaaaaaactttatatattatggtagggttcaggaaactatgtatataacctaacattaatatcacttttttaattttttttatttttttatttttttttagtatttattgatcattcttgggtgtttctcacagagggggatttggcagggtcataggacaatagtggagggaaggtcagctgataaacatgtgaccaagggtctctggttttcctagacagaggaccctgtggccttccgcagtgtttgtgtccccgggtacttgagattagggagtggtgatgactcttaatgagcatgctgccttcaagcatctgtttaacaaagcacatcttgcaccgcccttaatccatttaaccctgagtggacacagcacatgtttcagagagcacagggttgggggtaaggttatagattaacagcatcccaaggcagaagaatttttcttagtacagaacaaaatggagtctcccatgtctacttctttctacaccaacacagtaacaatctgatctcttttccccacatttcccccttttctattcgacaaaaccgccatagtcttcatggcccgttctcaatgagctgttgggaacacctcccagacggggtggtggccaggcagaggggctcctcacttcccagatggggtggctgggcagaggcgccccccacctccctcccggatggggcagctggccgggcgggggctgccccccacctcctggacagggcggctgccgggcggaggggctcctcacttctcagacggggtggctgccgggcggaggggctcctcacttctcagatggggcggctgccaggcggaggggctcctcacttctcagatggggcagccgggcagagacgatcctcacctcccagatggggtggcggtcaggcagagacactcctcagttcccagatggggtcgcggtcaggcagaggcgctcctcacatcccagatggggcggcagggcagaggtgctccccacatctcagacgatgggcggccgggcagagacactcctcacttcctagacgggatggcggccgggaagaggcgctcctcacttcccagactgggcagccggtcagaggggctcctcacatcccagacgatgggtggccaggcagagatgctcctcacttcccagacggggtggtggccgggcagaggctgcaatctcagcacattgggaggccaaggcaggcggctgggaggtggaggttgtagcgagccgagatcacgccactgcactccagcctgggcaacattgagcactgagggagtgagactccgtctgcaatcctggcacctcgggaggccgaggcaggcagatcactcgcggtcaggagctggagaccagcccggccaacacagcgaaaccccatctccaccaaaaaatgcaaaaaccagtcaggcgtggcggcgcgcgcctgcaatcccaggcactcggcaggctgaggcaggagaatcaggcagggaggttgcagtgagccgagatggcggcagtacagtccagcctcggctttcacaactttggtggcatcagagggagaccggggagagggagacgagggagagggagacgagggagagggactaatatcactattttctgatgtctatatttttttagaacttttttatttttacaaatgtctccacaaattctaggatattttataaaatagcagaatactaaagaaatgggtggtttgccatactatatgaatactggtattcaattaaaataacaatattttcatcaaaatttagacagtagatttaaatttcttgatttttcactacagtgatagacattcataaatatttcagaaatcagagctgtattaggttttacttagtagtaatatgtataaaagatcaagaatctgttcaaaatagatatttctcatcaataatttgatgctttcaaatacccagaagttttgttttaatcagatgaagtctgaggatagtttactagttttattttttgtatgatgtgttcacaattttctaatttaacctaatattgataatggtatacaaatcaacttttttttcaaatctcataagtctatttattatgttgttgaagatatttttagttaacattccttctttcagtattttttacaggaatttacatctagtcaaatttgcttaaactgttaatcagtgtcaggtgccagattccaattcatttttagtgtgcctgtacttttctttctataacctctgaactaaatttatattgcttaattaaatgtgatataatacaactcacatatttaaaacaaaaccaccaggtaaaatgaattctggcttagtataaagaagctgttaccaaattagtgtcacatatacagatggatgtggctcaacaaaattttacacaaaaatatttggattgaactacacgtgttgccatgacttagcctctaatgaccttataaataaagacaaattaatacacatttattcattttctttcattgtgtctaaaggtagcatgtcaggaaatctcatgctactgtctgaaaaaacacattctactgttacctaagaaatcaactggatggcatttttataaccttgcaccacataaggaaaaactgcaatgtagtctgataaatgcagactccatcacatggaaaaggataatccagaatgccactttcaatacttaagtattcaaccttttggttgaaaaatgtagtaaaatagagctcttggtaagttttgtgtagcttaacatcagcataaattaggaaaaaatatcttttaaaatgtaaacaaacaaaaacctacaccaaaaacaaaaacattcaccaatgcatacatattgactgacgctccagggacataaaataatttttcctgggtacacagctagtgacccaaatcaagctcaaatgtgtgattttaaaaatttcattttcccacttttgacaatattgacataacagcgaaatcttactctcagagttgatagttgaaaataaactaagacaagtactgttgagggaggctaggtagccaagaaggtcaccatgtccttgggacatgcagcaggcatggcgattgcatagtgacagcatattggcaacacaataagccccaacatttgcattgtatttcagctcactgaagcacagctctcttcagtagggaagagagttctttactcccctgtaaagaacatgcacattttgattttacttgtcctctgaccttttactcattataatagtaaaaaacacacaagtgagtggagattaaagatgctaataagatatgtgacacataagcatgtacagccactgtgtatgtacaccaacaagaccactcagaacatgctaactaataacaccactttccacctcttcataaataatgatctaagactcccatagatggagtctctctagttccagtctttgctgtctcattcttataagcagcccaccctgaatcccttctctcttggggctattttgcacctaatttttaaaatagtatttcaactttgcaataaatccctctatgttgcatcttcattgttttgtgtctcttgtttaaatttttgaaactaagaaccaaggtctcacaacagccatcaacactatcgtgctttgttttgtattcttcattaacagtatttttgggaatatgtcaatatctacattttaaacacagcccaaactgctaaattaaaaatttaaatgattgtaaaagcatgtatatttttcaagtttcagcttcattacactttatgtattgaaatttttaaaaaattctgccaggcacagtggctcacgcctgtaatcccagcactttgggaggcagaggcaggcagatcatctgaggtgaggagttcaagatcagcctgggcaacacagtgaaaccccatctctactaaaaatacaaaattagctgaccatggtggcatatgcctgtaatcccagctactcaggtggctgaggcaggagaatcgcttgaacctgggaagtggaggttgcagtgagccgagatcgtgccattgcactccagcctgggcaacaagagtaaatctccatctcaccaaaaaaaaaatttaaaaaaataaaaaatattgtgacacaaatatatctgtcaaatttaatatcttacgtaataatttgaattcacttccaaaatgatttatattcatttattgttatatttacttttgaccaaatttagctttccaaactaaataaaaactgaagcatgttttcaaagtttcaaggaactaaagtttactggcatcaaattctctgtagtaaaatgaaaaaataaaaccatctttttatcaataatattttatatctgagcacttaagcatcaaggacaggattttggatgatgttgagtgaatatctaaattaatgaagtagaaaataattatcagaatagaataagtgatggatacagaaacagagcacttgacaaaaccattcagggtatgtttgacaaacaagaagattgtataggacctgcactgcactgcactactaatgtaaagcgttctctgtaactttagtctttattctcaagcttacaaccaccacatactcacatacacagaataaataagattagctccttttcctggaaggcagtgattcctcttttattctattacgtctgttccatattgctgtgataatgctgttgaagtgcaccctgttacaccagaagatcacctgtgtgaatgtgaatagactgacactggagaggaccagctcagcaaacacatttgaactgcctctttgcatttcaggcagttaaaaatgcctttgaagagtgaaaataaagttactgctgattaagcagagagtttaacatggaaaaacgtttttcaattgtttaaaaattacaatgcatggactacaacttttaaaatgtaaaatgcatcacataatactgcaaaaaaaaaaaagaatagaaatgatagggttggccacaaaggacagccaaagctgtattatagcaatatagaaaaatacatatctactgccagaggaaggtaacttgaagtatttgagaaatgtactctaaaaatctaaaattgtttttagtattagtttctataaaaaatgttccttaagcattttgaatttttgaaaaagttaaatacatgctttggcagtttagcttttctgaataatttgaatagaatagaataaatacatatcaaaatattaatttttctggtaatggataactttcagactaaaagagttaaactttacaaaattgtatgccgatcaatttgatcagaagcctctttcttggaactggaagagatgacacaaagatggtgctttcatgttgggtgggagagaaatggttaccaggggctacatcatagttgtttcactaatgaacattgattttcattgctattttgtctaaattatggtaataattaatggcctcgatccaaaaaattttcttaaaacttaagttgtcaatcagccataatattaaccaaaaatgcattaaaatgaaggtatttaagttataatttatattttcaaattaaaatacttctggaaatctttaaggttttctaggtagagcattatcagtgaagataatttaatttcctttttttctatttagatgcttttaatttctttattttcttggattgttctaactaggatgtctaaaattatgttgaataggagtgttagaatggatatttttgtcttatttttattctaatggagaatgcatgcagctattgccttttcagtataatgttggctgaggatttttaatacatggctcttgctattttgaggtatgttttgttaatggtttctttgttgagaatattttcatgaatgaatattggatttccttgagtgcattttctgtgtctattgtgttaattgtataattttttaattatctgtacatggtgaattgcacttactgacttgcatatgattaaatatctttgcataggtggaattaagctcacgtgattgtggcaaaacgttttgatttgcttatgaactcagattgctcgtatttcatggaggatatttgtttcaatgtttaccaaaaatattggcctgtagtttcctttttttgttgtgccttcactagattttggtatcaagataatattgattttataaaatgagttagggtggaattccatcctgattttttggagtacattcagtagtagtacgagctcatctttgtatatgaggtaaaattttgttgtgattttacataatccagggcttttatggttggtaggttttttattactaattcaatttcatcatatatattttatacatttttgccctgttcaagacttctgtttcttcctggttcaatcttggaaatttgtgtgtatccaggagtttatttattttcttaaaattttctagtttgcaggcatagagatgttcatagtagtctctgatgattttttgtatatatatagaattaattgtgatttcacatctctaacatttaaatagatgcagagtacaaaagaatagatgcacacaatggaagtttggcaaaatttgacattcctttatgataaatctctgaaaaaatttgttatagatcaaattattggcacctcagccaataagtgccacatacaaccaaaaaatgcacaggtaacaacatactaaatggggatatgttgcaagattttactcaagagctagaacaagacaaggatgcccactcatccttgctaaagtcagtcttactaaacatagaatgaatctaaggcaaagaaattagagaataaaatcaaaggcatccagattggacaaaaggaagttaattattcctgtgtaattatcttttatccttatacataatctgaagtatagaaaaccctaagactggctgggtgcagtggctcatgcctgtaatcccaatactttggaggccgaggcaggcagaccacctgaggtcaggaggatcgagaccagcctggctaacatggtgaaacccaatctcaactaaaaatacaaaaagaaaaaaaaaaaagttagccaggcctggtggcacaatacctgtaatcccagctactctggaggctaatgcaggagaattgcttgaacctgggaggtagaggttgcagtgagccgagatcatgccactgcactccagcctgggtgacaaacgtgagactccatctcaaaaagaaaagaaaagaaaagcctaagattttactaaaaactattaaaaataaacaaatttattaagctttcaaaatacaaaagtaacatcaaagtcagtagcatttctacacattaactatctcaaaatgaaaattaaaaaacaatttcatatacaataactatagtagtaaattcaatacaaagcagagagtatacatttgctttcagcatttttgaggcttttagttttatactagttaccttgttaaaataatttttccaatatttcttatgaaaataagtacaaacttatactaacacagacttacttactccatcatttccttacacctaaagtttatctctacagtaatgtatatttaaccctctgtatatcaaacctaaaagtctgtatgtgtttgcaggcagacaggacacaagttcaaatatatatatgtttaaaattttaagatatgtactcagaactcagaaatgtatgtatttaatttatacttgcatatgatttctataataaccataaaaatatcccagtagtcaataataatttaatcgtactttattttttatttctttttttgcttgagatggagtcttgcagtgtcacctgggttggagtggagtggtgcaatctcagctcactgtaacctccacttcccaggttcctggccatctcaaactcctaatctcaggtgatccatccgccagggcctcccaaaagtgctgggattacaggcgtgagccactgcacccggccataattgtacattttaaaataagtaaaagtgtacaattggattgtttgtaatacaaaggataaatgctagaggtgatggataccacatgtatctcgatgtgagtattatgtattgtatttgtgtatcaaaatatgccatatatgccataagtatatacactcatgtacccacagaaattaagaaaaacaaattaaatgattaagaataaaaatttaacctacaggaacaatattctttaacttatttgcagtttaaagccactggcaaaagagatgactaaagatgttagtccattatgttaccaaatagtatattgttaacattttttacctatatttttgggcaaagtggaaaaggttaatctttgtggtaaaataacacttcattgaatgcacaatagtatttaacatgttaaaaatgttgaaacgattaacttcacacataatctaaaatttttaaaatgtactgcattttatcatataaaagtacaattagtacaatatatgaataatatactactagttttctcgtaatgcaaagaatatcactcttaacacctacctcgtgcatcactcaatagtgtaagttaaccacaaagaatctctccacttagattttcatcatgcatcttacattctaatatccttacttgtacatagaaaagatcataaataatgcccacctaatgaaaaagaatctctcatacctttgatgcagcaagaaatgatcacaaactttcacaagtgaataagaatgaagaaacagcagaaaataatgacagttgaattacatcatttgctttcaaaaaatctgtaattttttcaagaaataaagtatactttgaatgtagttattactctgcaaaaaacttttactcctcttaaagttatatacaaataatttttataccaactttagttttagattattttctatactcagaactctgatttagtataacatctgaagtgtcagttccttatatatttctactataaattctctgatatttatgtagacttaaatttgaattaaattttttttttcatttttactgcattttcaaaaacatattgtagtataaactctggtgttttctaagctgtagtttttgaaaatttgttttcccaaatttattacatttgcaagacaactcttcaatataaattccctgatgttgaacaaagtttaagcaactcctttagagttttcctctagtacaaaatgtggacaataagatctgatacaagtaaagctactacaaccctctttacacgtgtaatgctcatcttcaatataaatcctcttcttcactttaaagaataagattttctgaaaggtcttttgacggtaattgcacttatcatgcttttagtaagtattaactctctggtgttagtaagatgtgagcagatattaatgtctttttcacagtctatatttgtacaatttttctcaaatatgaatgcttttctctgcaataaggtgtgagtattagttaaaaattttgccaccttgttctcacttgtaggaattttttccactatgaattatatcacctataatcaagtatgacaaccatttaaagactttgtcacattcttcacatttctaggatttctcagcaatatgatttctcttatggttagaaaagtttgaggtattgtcaaaagcattatcacatctttctgatttgtagagtttctctccagtatgaattatcttatgtgtgttaagaactgaggactagctaaagcctttgccatatttttcacactcatggggtttctctccaatatgaattttcttatgtttattaagaattgaggactggttaaaggctttgtcacattcttcacatttgtagggtttctctcctgaatgaattattttgttcaataaagttttaggactggttaaaagctttgccacattcttcacagttgtaagcagcttatgttatgtttagtaggagttgaggactggataaaggctttaccacattcttcacatttgtaagatttttctccagtatgagttatgcttagtaagttttgaggattggttaaaagctttgccacattcttcatatttgtagggtttctctccagcatgaattaacatatgtgtagtaagggttgatgattggttaaaatgtttgccacatttttcacatttgtagggcttctctccagtataagttatcttatgtgcagtaagttggggggacaggttaaaggctttgccacattcctcacatttgtaggttttctctccagtatgaattatcttatgtttagtaatggatgaagatttgttaaaagctttgcaagatttttcatatttgtataatttctctcccttatgaattattttatgtttagtaaggtatgagaatcagtaaaaagctttgagacattcttcatatttgtaggatttccagcatgaattatcttatatgtaggcaagattgaaaagtggttaaaagctttgtcacattttacacatttgtaggatttctgtatggtatgaattcttttatgtttagtaagggtcgaggaccaattaaagcctttgccacattcttcacatttgtagaatttctctccagtgtgaattttcttaagtttagtaagtatgagaatcaatagaaacctttgccacattcttcacatttgtagggtttctctccagcaggaattatcttatgtgtagtaaggtttaagtaccgtttaaaagcttttccacattctttagtaagggaagaggaccagtaaagccctttgccacattcttcacatttgtagaatttctcctcagtatgaattccaatatgaatgaccttatgtctactaaggtatgaggaccacttaaaagctttgccacatttggctgggtgcagtggctcaagcctgtaatctcaggaccttgggaggccaaggcgggcagatcacgagttcagaagattgagaccatcctggctaacatggtgaaaccctgtctttactaaaaatacaaaaaattagctgggcgtggtggtggcggcctgtagtcccagctactcaggaggctgaggcaggagaatggcgtgaacccgggagtggaggttacagtgagcctagatcatgccactgcactccaacctgggggacacagcaagactctgtgtcaaaaaaaaaaaaaaaaaaaaaggaaagaaagaaaaaaagatgaattatttcctttaactaaaaaataaacacaaaatttcagaaaagacacatttgaagaacatgtttaagagactctcagaatctctaactcagacaattgttcaaggtatgccaggggaaagccacattataaagattgggacaggtaagtttttttaatattcaaatttgaataaaagattatgatgtggccaggcgcagtggctcacacctgtagttccagcactttgagaggccgaggcgggcatatcacctgaggtcaggagttcaagaccagcttgaccaacatgaagaaaccccatctctactaaaaatacaaaattagccaggcatggtgacgggcatctgtaatcccagctactagggaggctgaggcaggagaatcgcttgactgggaggcgaggttgcggtgagctgagatcatgccattgcaccccagcttgggcaagaagaggaaaattccatctcaaaaaaaaaaaaaaattacaatgtatataaaatagggcaatgtggttccattaaaaataatataaaattttcagaaagaaacaataacaaatgtttacattagttttaaaaattgaaaataaattgaataatacccaatgagtgaaaaaagaacacagagaactataggatatcagaaaactggaaataagaataaaaatacttaaaatattagaaaaaagaaattatggaggtaaaaaatatataaagaataactgaaaaatctttaaaaaaagacataaaaatgaagaagctcaacaaacaaactaggatacacacaaagatatttatatcaaacacatacataagcacaattttaaaagtcacagaaaagggaatcttgggagctgcaagataaaagtgatgtgttggctgggcatggcagctctcacctgtaatcccagcactttgagagaccgaagcaggcagatcacctgaggtcaggagttcaagaccagcctgttcaacatggagaaacctgtctctactaaaaatacaaacttagccgggcgtagtggcacatgcctgtaatagcagctactcgggaggctgaggcaggagaatcgcttgaaccaaggcggcagaagttgcagtgagctgagatcacaaaattgcaatcagcctgggcaaacaagagcaaaactcagtctcaaaaaaaaaaaaaaatggtgatgtgttatttgcaagaatactcttatgggatatccaatggattctcaacaaaaattttgcaggccagaaggaaactgcatgatatatttaaggttcaaaaaaaatcaagtgagtataataccatcaccaaatctgtccttccaaataaaaagaaaaaaacctcaaaaataactaaattctaaaacagtatattggcactgccttacatataaaaggtgctgaaagcagtcgcttccaatgaaaataacatgattcaacaaaacaacacataatcatattaaaatacattattttctgggaaagatgtgtacatacacaaaaataaatttcttagcacaaagaatacatctatatagatacacaaaataagaaagaagaaaaagcatatcaaaatcaaaataaaaaagacacaaagagacagaaagagagaaaatgtgggacacaggtacaagaatcaaatagaaaaataaacaaatattagtctctttgtttaagaaaactttccaatcaagagttatactttcaataaagaaatttatttacaattattaaaaaccaagatccaatttgcctttctacaagggtcagctgacatctaatgataaaaaagatactgaaggtggcaagatggatttagacattggatgcaaatattaaccaaatgagagcagaagaggtcaaaatagtattacaaaagctacatcttaagtcaaaaactgttatattttatataaagtactttaagtcaaaacagcaaagaggcaaaggacattaaacaataatagatatatttactgggaacctattgcaaatttgtgtgcgtgtgtgtgtctgtatttcacaccaagttttcaaatatataaagcaaatattgacagacaggaagaaacacctaaacagcaatataattatagtaggaaatttcaataccctactttctgtaataaaaataaaacaagacagaatattagtaagtgaagagaggaattgaaggcagtataatacaattatttttaacagtggaatagacaagagccctcaacaatatcaggaaacacattcttatgaatagcttatacaacattctttttgatagaccacctgttaggccaaaaaaaggagtcttgaaaatttgttaaaattgacattttgtggattacattctataaccaaaatggaatgtaagtatagaacagaaaaaaaaattaaaaatgtacaaatatatagatatttaacaacacactcttcagcatgctcctgttcaaaagttgaaatattttgaagatgtccataatgctcaatgtaatctacagatttaatgcaatggtttcttttgttttgttctgttttgttttgttttgttttgttttgtttggagatggagtcttgctctgtcacccaggctggagtgcagtggtgcgatctcagctcaccgcaacctctgcctcccaggttcaagcgattctcctgcctcatcctcctgagtactgggactacaggtatataccaccatacctggctaatttttgtatttttagtagagatgaggtttcatcatacaggccaggctgggttcgaaatcctgtcctcatgatccacctgcctaagcctcccaaagtgctgggattacaggcgtgagcccccacaccatgcaataaaatgtttttaaaaatttctcattccatttttgaggaaatagaaatagcaatctcaaaagtatatagactatcaagagaaaatgaagtacccaacagtcttcaaaagaagaaacaatgttaaaggcattacaatttctgatttgaaaacacattacaaagctacagagttaaaacaatttgggggctgagcacagtggctcatgcctgtaatcccagaactttgggaggtcaaggcagcaggatcacaatgaggtcaggagttttaaaccagcctggccaacatggtgaaacccagtctctactaaatatgcaaaaattagctgagtgtggtggcaggcacctgtaatcccagctactcaggaggctgaggcagaagaatcacttgaacccaggaggtgaggttgcagtgagccatgatcatgccgtcatgccattgcaacccagcctgggtgacaagagtgaaactctgtctcaaaaaaaaaaaaaagaataaagaaaaagcaagaaaatagactttaaaaaaatctgtatgagtatagtcattaaaaagtgaactaataaaataggcagcacttatataaactttcatatacatgatcatatgaagagttatttgcatacccataattattgcagcattgttactgaaagccaacaggtagaagcaattcaaatttctgtaacaaaattattcagtagatgtaatttgaaatagaaaaataccatattatcatccagaattttataagcaggaaatactctaatactctttatagataaattttgacattatgcaaaatgaaatgagtcagccacaaaaagatagaaattgtaagaaatatatgaagcagttacactcttagaaaaagaaaacagaatggtgtttggaaaattcagaaaaccagaaaaattggttgttgtttaatgtgtattgagatttcgttttgaaagataaaaacattttagagatatgttgcataacattgtcaatataatatgactaaacagaatattaaaaaatatttgataataaattttgttatgtttttgacaagtaaaactaatacctaaaaatatagagttatgagagttttaatattatcttcaaatcccaaagtgttccttacacacaaaaataatatagattcacaatagacattgaaattaggagaatttttacgactgctcacctagacaagattgaacaaccatttacaacaaacctacataacaaatatacaagttattttaaaaacagcaataatatttatagagggaaacaaacatagaggtaatgatattggaagcagacatatggctgattcgtagttgattttgctcaacactgtcttaaattgtacagagttaaacattgtcatacagaattataatataaatcaaaacaacaaaacacaattaactggtttgaggtggcataccctgaaatacataacaaaaaatataatattgccaaagaaaattaaaatttagaatgtaaaaattattggacaccatcaagtagatcaatatattcatgaaaggaatcttaaagccatatataaaataaagcactctattaaatataaatataaagacacacatagaatgttttactgtcataatgatggtacataaaacctttgaagttcttctatagatataaaaaaaacataaatctgcacaaatctgttaatagatacaaaataagataacataatttgtaatacctataacaaactggaaaatatagcagtatagcttttgtatttaattaatgttattatgagattaaaagatactgttttaactttaaggtgttttatataatctccagttttcaagatggttacaatatacttcaagatgattacattatattataggaagtatgcaaaacaaaattttaaaaatcacaccatgtcacaacaaagttaaacaaaaattatgatagtaaaacaggtaatgagaaaaaacatgtctgcaagaaacacataaaacagtaacagtgaggtggttcctgtagatcagtagacttagtctttccctctgctggctctgaggaatctgggcagtacagatgtatggaatctccccctgtgcagcacaccccctacaccaaggagcaaccagagtgctttgttaagtggttcctggatcttgtgcatcctgacttggtgagaacccccccctcaaaaggtggtgtcaggcaacttataaaggagtgttcccattgtcatcaggttggtgcccttctgggaacaggccttaaagaaactggccataaactggatttctgcagcaatgtgacatgctcatgatggctataatgcacactgctagaagttgttggtttactggagcaggcaaggaacatctggcctgcccggagcagaaaactgctcaaaccacacacaatagcaggagcagcctgtgccttaacaacatgtttttgctacagataatcagccagagcctgtttctctactctttgctaagaatgctttgtttcccataaggaatgcttttagctaatctatagcctatagaaacaatgcttattactggcttgctgtcagtaaatatgtaggtcaaactcagtttgtggctctcagctctaaaggatgttgcccctctgactcccactctgcactctatttctgtgtctttgtcttaattcctctagcaccactggtttagggtatccatgactgagctggtctcagtagtgtccctctgggattaagatctcagagaaaggaggagacagtcatctctgctgttctgcagcctccactggtgacacctccaggtgtgagagaaacccagacaaatagagtctgaagcggattccaagcaaatgacagcagccccacagaagaagagcctgactgttaaaagtaaaacaaaaagacagaaagcaacaacaacaacagcaccaacaaaaaagtccccaaaaaccctatccaaaggtcagcagcctcaaagatcaaagctagataaactcatgaagatgagaagaatcaacaaacaaatgctgaaaactcaaaaagccagagcccctcttctccaaatgatcacaacatatctccaacaagggcactgaactgggtgaaggctgaaatggataaattggcagaagtagtcttcagaaaatgggtaataataaactttgctgagctaacaaagcatgttctaagccaatgcaaagaagctaagaatcataaaaaactaccttagagagaaacagaaatgacctgagggaactgaaaaacacaacatgagaacttcataatgcaaccaatagtatcaataactgagtagaccaagcagaggaaagaatttcagagcttgaagactagcttgctgaaataagacaggcagacaagattaaaaaagaataaaaaggaatgaacaaaatctctgataattataggattatgtaaaatgatcaaaactatgactgtttggggtaccttaaagagatcaagagaatggaaccaagttggaaaacatacttcagtgtatcatccagaagaacttttccaacctaacacgacaggccaacattcaaattcagaaaatccaaagaacctcagtaagatgtttcatgagaaaatcaaccccaacacacgtaatcatcaggttcttcaaggttgaaatgcaggaaaaaatgatatgaacagccagaaagaaaggccaggtcacctacaaagggaagctcatcagactaacagtggaattctaagcagaaatgttgcgggaagtcagggaccccgaacagagggactggctgaagccatggcagaaaaacataaattgtgaagatttcatggacatttatcacttccccaatcaatactcttgtgatttcctatgcctgtctttactttaatctcttaatctcatcatcttcataagctgaggatgtatgtggcctcaggaccctgtgatgattgtgttaactgcacaaattgttcataaagcatgtgtgtttaaacaatatgaaatctgggcaccttgaaaaaagaacaagataacagcaatgttcagggaacaagggagataaccctcaggtctgactgcctgagagccaggtggaacaaaccatatttctcttcttatgaaagtgaataggagaaatatcactgaattctttttctcagcaaggaacagccgtgagaaagagaatgcactcttagggggaggtctctgaaatggccgctctgggaatgtctgtcttacacagttgtagataagggatgaaataagccccggtctcccatagcactcccaggcctattaggatgaggaaattcccacctagtaaattttagtcagacagtttgtctgccctcaaaccctgtctcctgataagatgttatcaatgacaatgtgtgcctgaaacttcattagcaattttaattttgccccattgctctgcccctatttgccttgtgacattttattgccttgtgaagcatgtgatccctgtgacccacaccctattcatacactccctcccctttgaaaatcactaataaaaacttgctggttttgcagcttagggggcatcatggaacttgccgacatgtgatgtctcccacagacacccagcttcaaaatttctgtcttttgtacactttccctttatttctcagactggctgacacttagggaaatagaaaagaacttatgtgaaatattaggggtggttcccctgatacagaaaccttacaagctataaagattggaggccaatattcaacattcttaaagaaaataatttccaaccaagtatttcatattctgcaaaattacacgttataagttaaggagaaataaaatccttgtcagacaaacaaatgctgaagaaatttgtcaccaccagacctgccttgaaagaactcctgaaagaaggactaaatatagaaaagaaaaagaattaccagccactgcaaaaatacactgaagtacaaagactaatgacactgtgaaacatcaacaagtctgcaaaataaccagctagaatgatgaaaaggatcaaattcacacaaaactatattaaccttaaatgtaaatgagttaaatgcaccaagaaaagagacagaatggcaagctaaataaaaagtcaggactcattggtgtgctgtattcaagagacccatgtgtcacatgcaaagacacaaataggctcaaaataaaaaaaggaggaaaattcactaagcaaataaaagcagaaaaaaaagcagaggttgcaatcatagtttctgacaaaacagactttaaaccaacaaagaccaaaaaagataaagaagagcattacataatgctaaaataatcaattcaaggagcacccagattaaacaagcacattcttagagacctacaaaaagacttagattgccacacaacaatagtgggagactttaacacctcactgccaatattagacagataattgagaaagaaaagtaacatggatattcagaacttgaactcagctctgggtcaagtgaacctgatagatatctacagaactctccagtcaaaaacaacacaatacacattcttataagtgccatcttttagatggagtcttgccttgttgcccaggtgaaaatggctggaatgcaatggtgtgatctgagctcactgcaacctccacctccagggttcaaatgattctcctgcctcagtctcctgagcatctgggattacaggtgcatgtgaccacacccagctaatttcttttatctttagtagagatggggtttcaccatgttggccagactggtcttgaactcctgatcttgtgatccacccatcttggcctctcaaagtgctgggattacagtaagtgtgaggtgaagaagtcaggttctttgaataaaccagctctcatttgaattaatggagtgaaaactttctgattatcaaaaagatagtgtcaaggcatttatgaggtatttttccccttaacagacatgtacaaaactttctacttaaaagtcaaagaatacaaaatattcttatttgcacatgacgtattcagttaggaaatataacaagtcttattaaataataacagctgggggtagtggctaacatctataattccaacaatttggaagatgaaagtgagggagtcagttgggaccagaagtttgagaccagcctggataacatagtgagaccctgtccctacaaataataaaaaaattagccaggcatggttgtgaatgtctgtagtctcagctacttgggacgtttaggtaaaaacgtcatttgagtcaaggaggctgaggttgcagtgagccaaaattatgccactatactccagcctgagtgacaagtttgatcctttctcaaaatgacaacaacaaataaatttaaaaccaaaatcatacatgtgtgttttcttaacaaaactgaatgaaactagaaattaaaagcaaaagtaataatggcaaatccaagaatatataaaattgaaacacacaggctgagtacagtggctcccaacctctaatactggcattttgggaggctgaggcaggaggatttcttgagcccaggagtttgaaattagcctgggccacataggaaatccttatcaaaaaaaaaaaaaaaaagaaagaaagaaagaaaaagaaagaaaactaaaaaaacacactcttcatctcttcatcatattcttgctcaggggtcaaaaaatttaattgtgttaaaatgtcaatacaacctacagtggtgaacatattaagtatattctctataaaaatcacaatagcgctgggcatggtggctcacgtctgtaatctcagcattttgggaggccgaggtgggtggatcatgaggtcaggagttcgagaccagcctaaccaacatggtgaaaccccgtctctactaaaaatacaaaaattagccaggcggggtggcaggcacctgtaatcccagctacttgggagactgaggcaagagaatcacttgaaatgggaaggcagaggttgcaggttgcagtaagatgagatcatgccactgcactccagcctgggcaaaagagcaaaactccatcttaaaaaaaaaatcacaatggcacagttttattacagaaatattgcttaatattttaaaatttgattataaactataactagcaaaacacccatgaaaaagaacaaagagacattatactttctgattttaacacattaaaagttgcaataaaaaagtatgatacatacacaaaggaagataaaaagatgaaagaacagaatagagagcccagaaatgaagccttctgtatatgattacatgatctcttgcaaagttgccataagcacacaatagagaaaagatgatcagtcttctcaaaaaataatgttaaaaacttactatcgctttccatgctgacagcactcacacaaacatggcgaatgtccctaaaacccactggactttctgtaagaagtgtggcaagcaccaaccccacaaagtgacacagtacaagaagggcaaggattctctgtatgcccagggaaagcagcattatgacaggaagcagaatggctatgatgggcaaactaagccgattttccagaaaaaggctaaaactacaaagaagattgtgctaagtcttgagtgcattgagcccaaatgcagatcttagagaatgctggctattaaaagatgcaagcattttgaactgggagtagataagagaaagggccaagtgatccagttctaaagtgtcatcctttattatgaagacaataaaatcttgaatttatgttaaaaaaaaactgaatatcaacactgataaaataaagttacatcatttccttgaaccatatacaaaaaatttacaaaaaaaatacttaaatgtgttgcaggccaaaaaagtgagggtcatgatccatgatcaactcagtgtaccactggaggctatatgagtaaacagcaagctgttctcatgaatgcagaatgttggcaaaccgacaaactgcatgtgccacccagaggttatgctgagggcagtcacaccccaggcacaaatgtttcatgtgattaggcatacctgaagtctaatagcaataacgagaacctgtgatcaatcaagagctgaccaatcattacctcctcctccctgctctttctaccctgtgaatttggggatctgtggaagctcagggcagctgcccttgctcactagaagctgggagccctcttcttcttccccagaccctttccttaaagcatattgctttttccttggttttcatttcttcattcatcctccttcgttcagtcctgcagtaaccgtggcaaaccgtggcaagtggtgcccaacgtgggacttgatgaagggaactgcagggtcatacagggacttgcagggaactgaaggaacttacaggacctatagggacccatagggacagtcgagggacagataggaaaagataaagactagcagagacttgctgggacagaacagggacagaatagggacagagacagatagggtcctataggagcttgaacaaggaaggtctgcaggagcagaaaaagaagaaaaaaaagaaaagaaaaaaaattaaaaatgaaactgaccaggtgaaggagaaaccccttacgagtatgccggcagcgatataccctaaagaggtattggtcagtgccctaaaaggtacatagaatggaaagtttttgaatcagggtaacatgggggaagaatttggctatttcttttctcttttctgtttggagtttggtttgtactgttcttttgtcattgttccaaaatttaaaagaattttttgccctacccacagcacctatcgagggtggtgaacagaagagggaggatgaaaattggcttgtattgtttcttttgtggttgcagaaatgttaactttaactttggcttttgaaagtgcaaacgtttattgtggatgtgcactggcacctgtgagatgtgcagagagcttgggaaattttctcagagcctgtcaagatgtgagaactgagcttcatcgctctacaatgttggttcaagcaatggctaatttagtagttgataaatctaaaaagagccaagggtcaaactctaaacgggggaaatactataagtgtagaaagattggacatttcaaaaaagaatgccatcagatctctgggcagaagggatttgataatgcagtttccctctaacagaaaaaaatgccaggcctttgcccttgttgcaattaaggaaatcattgggctaatcaatgccactcaaaatttcatcaaaacaacacccccctgtcggggaatgagaaagggacctggacctgggcacctcaaacaatgagggcattccccgtccaggccacaactccatttcaggggtgggtttccggaggagcattgattccctctccccaggaacacctggaagcgcaggattacatctcccagccagagaatgggttacattaattgaaggagaaaaacccaataagatgcccactggtatttgggtacctttgccaataggatatatgggattaattttaggtagaagtcatcttaacttacatagcattgttgtagtccctggagttgttgattctgattgtgaaggataaattcaagtagtggtattgtcacaagatctttgggatttttaactagaatataatgctcaactgttgcttattccctgtaaattgatctttgggtttttgaactaggagatcaactgttgcttgttccatgtaaatcgcacccatcttcacaaaaggagaaaggagggaattaaggatttggaagtacaactacatgggaaatttatctatcacaacccatagcatgtaatagacccacctgtacagtgcaaattaaaggaaagagtttttatgggcttatggatatgggagctgatgtgtcagtaatatctaaaaataattgggccctatcttggcccttaaaactaacttctacatccctagtgagaataggagcagctcaaagtgttcaacagagttctatcctgtctcggaccagatggacagttatatacttttcaaccttatgttacgaatatagctgttaatctatggggtcgagatttacttacagcatgggatatgagacttacaaatgaaactattgataatccaggatttaaatgttaaagaaaatgggatatcagaatggaaaagccttaggaaaatccctacagggaaaccctgatctaatatcaataactggacacacagatagaaaagggttaggacatcaggacttctgatggggaggtcattgatatttctcctccacctactgctttgccgctagagtggctgactgacaaacctgtatgggtggatcagtggcccctatcacaggggaaactgattcaactccatcaattagtaaaagggcaattggaagcaggacatatagaagagtcggttggcccatggaattcaccagtatttgtgattcctaggaagtcaagaaaatggtgattgctgcatgatttgagagctattgatgcacagattaaaccaatgggtgcattacagcaaggtctgccatccacagcagccattccaagagactggccttaagtggtaatagatcttgaggatctattgtttttgctgtactgttgcacgagaaggatgggcctcaatttgttttctctgtgccttctgttaatcagaaagagcctgtctctcattatcaatggaaagtttaccccatggcaattagccaaagaggcagaagctgagttagaaccacaaaagcctttgcttttgttttggtagatttattaatgtggggacgagagtattcgtgcgtctgtaaaaagtaaagtagaggttcctcttcagagactttcctccccatttaggaataaataataatttctcttagaagcaaaatttattcaaagacctgtgctaacattcttaaatatctgctagccgtgataaagtaatcaatgtactttatgttcttagctctcacaatgtagcctaaatatttgccctgacatgcttacactagtccaagcaagcattaggtcatagcctgttcctcttccttatttgaaggtgtttttacctttctcagcattccacaagttacttcctccttcctttgttctcctctgcctttgactcttttaaaaaattctaagttgctaaacaattgggacacatacagaatgtgaggtcccattccggccaatggaaaccaaacacagcagtagggtggatgcatcaggttataaatgaccctgtctcctttgtttggtatactctcatggcaaaactgccggtgagtgtcccctttctgcaggaagtaaaaatggccttgctgaataaattaaatttatgttcaaatgctatttctttatggcaccagggaacaagcatttcaaacatatctttacaggaaatgaacaaaccgtgtgggtgccctcaggaacaaggttccaactggagtcatgctgacattaaccctcataacataggaacagttcaagaaaaccacacaagaagctgataaactgctggagtgccagggtcaggcaaaaactcctgactccatatttgtggccaagctggctgtaattttctgtacatctgtaagatcagctggaccaccagctggcagttgagggctgtacagtctgaattgccttttttcaactaaaaacaggacgagatgttacaggccaaaaaagtgagggagggttgtgatcaactcagagtaccactggacgctatatgagtaaacagcaagctgttctcatgaatgcagaatgttggcaaactgacaaactacatttgccacccagaggttatgctgagggcggtcacatcccaggcacaagtgtttcatgtgattaggcatacctgaagtctaatagcaacaatatgaacctgtgatcaatcaagcagctgaccaatcattacctcctcctccctgctctttctacccagtgaatttgggaggctgtggaaactcagggtggctgcccttgctcactagaagctgggagccctcttcttctccagaccctttccttaaaagatattgttttttctttggttctcatttctttgttcgtccttcgttcagtcccgcaataaccgtggcaatccgtgacagacatgcggccgggtgctgtggctcacgcctgtaatcccagcactttgggaggttgaggcgggtggatcacctgagatagagagtttgagactagcctgaccaacatggagaaaccccgtctctactaaaaatacaaaattagccaggtgtggtggcatatgcctgtaatcacagctactcaggagactgaggcaaaagaatcgcttgaacccaggaggcagaagttgtggtgacctgaaatcatgccatcgcactccagcctgggcaacaagagtgaaactccatctcaaaaacaaataaaaaacttaaacataaaaaaataacaaatcccttagaaaaaaatagaaaaaagagatgatataggtcttggcaccattttcttagaaatgacattaaatgcatgaacaacaaagaaaaaaatagaaaaatgtaagcacactatattcaaaatttctgcacactcaaaaaaatattcagtagagtgaaaaatgccctctagtaaacaagtgaaaatatttgcaaaacacatgtgataggagttaatattcagaatatataaacaactcttaaaattgaacaataaagctaaattgatttagaaatgagcaaataattgaacaaaattttcatcagaaaagatacacatatagaaaaaaacatttgaaatgacacagaaaattaatactttgtagagaaacacacaaaaataatgaaaaaattgcctcacacccattacaatggccactataaaattttaagcacaccaaatctgttgatgatgcaataaaaatgaaacctatgttgattgttagtagaaaacaaagataccgtcattatttttaaatgtcatgtttctcaaataattaaaaatggaattatcaaatatagcaatcccatttatgaatctatagtcaaaatatgccacacaagacaagaagacctatttgaacatcgatttattcacaaaagccaaaaggctgaagcaactaagatgtctcttgatttatgaacacatcgaaaatgtgacatatacatacagtgaaatattattcttaagaaagaaaatcttgtcacattttaagataagctttccaagtattatgtcacctatataagccagaaacaaaatgatggatgccgtatgattccacttacatgagatatcctaagtagtcacacttataaaaacagaaattggaagggtgtttgtcaagggctgggaaaagggtacatgcgttgttgttacttaatgggtactgggttttagtttcacaagatgtaaaactttcagaagtcttttgcacaacaatgtgaatatacttaacatgcttgaaatgtacagattggttttgagacaggttctcactctgtcacccaagctgaagtgaagtggcacaattaaggctcacttcagcctcaaatttcaaggctcaagtaatcctcccctctcagtctcccaagtagctggaaccacaggtgcacacgatcatacttggttattttttaaaaaaattttgtaagaaggaatcttcacatgttgcccaggctggtctgaaaattttgggttcaagtgatcttcctgtctttgcctcccaaatttctgaaattacagatgcgagccacccacatgtctggtcctgaaatgtacacttgaacagatttaagatgctaaattttatgttgtgtgtttttacaacaattaattttctaaaggaaaaactgaaaataatactgaattataactctttccaaaaattaccttcaaatcccagaagtgtttctcttacacaaaggaaatatatattcaacattaaacgcactgtgaaaataggaaatggtgaaaatatttccatgactactcacttagacaagataaaacgaccattgaaaatcagctaagaaacaatatacacaagataaaccataaccaatattggggtcatatttatagataaacaaacacacatatataatctgattgtgatagacatatggctgatttatctcttaattaaacctcacattgacttaaagtgcacaagcagaattgcaaattgactacaattgtaatacataaaaacaaccccaaaacacaataagctgatgttaagaaacgtacacgaaaaaaaccactaatataaaactgcacaataagagacaggtttactgataaaatttggtatgcaacattagtaaaccattaaaaaagaatttgtctaactacagtatttgactgtaactgtgactcatcaaaggtaggtattttgaatcattggcagtaaaatttcagggaatatgcagtataattataaataaaatatcctgatgagaaactttttttttttttgagatgcagtctcgcattgtcacccaggctggagtgtagtgttgcgatctcagctcactgtaagctccgcctcccgggttcacgccattctcctgcctcagcctcctgagtagctgggactacaggcacccgccaccacatccggctaactttttgtatttttactagagatggggtttcactgtgttagtcaagatggtctcgatcccctgacctcgtgatccgcctgcctcggcctcccaaagtgctgggattacaggtgtgagccaccacgccgggcctcaagaaacttttaataaataagcatttaaaagaaactagtgaccgggcacggtggctcatgcctgtaatcccagcactttgcaaggccaaggcaggtggatcacctgaggttagcagtttgaggccagccaggccaacatggtgaaaccccatttctactaaaaatacaaaaaaattagctggatgtggtggcgggcacctgtaatcccagatactcgagaggttgaggcagatgaattgcttgaacttgggaagcgaagatttcagtgagttgagatcacaccattgcactccagccagggcaacaagagtgaaactctgtctcaaaaaaaaaaaaaaaagaaagaaagaaagaagcaagtgttaacttttcttttctttttttttttttttgacatggagttttgctcttgttgctcaagctgaagtgcaatggaaatgatcttggctcaccacaaccaccgcctcctgggctcaagtgattctcctgcctcagcctcccgagtagctggaattacgggcatgtgccaccatacccagctaattttgtatttttagtagagatgggatttctccattttggtcaggatggtctcgaactcctgacctcaggtgatctgcccgcctcagcctcccaatgtgctgggattacaggcgtgagacaccatgcccagccacgataacttttatgttttaaatataagctattcatacacgaaataaaactgatgtaatccaactttagaagcaaagaatagccttacattgctaaattttaaaaaatatattttgcaaaatataattagagcctctgatatattaaacaaatatttagcaataaattatgttatcatttagatatatggacgaaaataggtgaaaatcttatttttttgcctacagcaaatttaaatttataagtaacgattttagtaaatatggagtgtctaccaattatctaaattactttagacaaaacatgtaaattctcacatattgtcctaaatgtctgaatctaaaattacagataaatttgaaatagaaaatagcaagtaaaaatgtataggaaaagaaacatcagtaagatgaaaaaatgaaaagtgctctatttgcttatccctcccacagcaagaacatttctcagccattctttacataaattcctttatgagagaaccaggcatcatggctcaaacctgtaatgaagatatatggtacactgaggttggagaattgcttcaggccaggatttcaagaccagcctgggttataaagtgagacctcacctcaaaaataagtgcctttgagacagctttgatatttagggaggcagttgtgaaattctgctaaagcccaagattgaggagcattccttttcagagagcaggtcctcattctggtgggaaattataggacctctggtcttggctacagaccaagaaatggcccaaccaacttggtcacactgagaattctgaagttactctgtaaccgtcccaaacttctcccagttacagtctggtagagaccctgcccttccagagacctggagaaagacagccatttgtagccatgtaggcaggcctacagaccttggtttttactgtggtccctgaagcagttcaatgactctgttccagctccatgggtagcagttcatggccagttctgcctacatagaaacctgcacagtgacctgaggaaatcctctctggtactcagtgaaagccatactcatttgcatcctgatataagggccactatatatggacccgactgcagaaagctgccctagagtctgctccacagataaaagtcctgaaggatatttaatctgttaaaaaacaaacaacaacaacaacaaaaaaaaaaaaacagcactttgggaggccgaggcaggtggatcacaaggtcaagagatcaagatcatcctggccaatatggtgaaaccccatctctactaaaaatacaaaaattagttgggcatggtggcacgcacctgtagtcgcagctacttgggaggctgagggaggagaattgcttgaacccgggaggcagaggttgcagtgagccgagcaactccagcctgcactccagcctggagacagagcaagactcccatctcaaaaaaaaaaaaaaaaagaaaaaagaaaacaaatgggaattacaactacccaagccccttgtaacaagccatctaaatgtggaccctagagcagacccagcagcctggtgaccaagttacaacccaactccactacaaacccagagggcatcccagaaccctggggacccaacaaaagcagatctttacctcctgaaatcagtatatgaaaatataagttgtttgctttttcaaattcatggacaccaatataaaaaacaattgtgcccattatcaatgcttctattttaacacagcactggaagtatgtggcagaataatgaataaaaaacatttttaaaagccattgaaatcaaagacaagtaaatagttgctgtttgaggaatatataatcttatacataaaaaaccatagacagtacattgaaatttgtctaataaatacactcagtaaattaacaaaatataaaattaacataaaagtataagttattgttctatacacttaaaacaagctattggatacagtagaaataaaaaatattttactaattttttttttttttttgagacagagtcttgctctgtggcccaggctggagtgtaataatgtgatctctgctcactgcaacctccacttcttgggttcaagtgattctgcttgttcagcctcctgagtagctgggattacaggtgcccactgccacacctgactaattttttatactttcagtcgagatggggtttcatcatgttggacagacaggtctcaaactcttgaactcaagtgatccatccgcctcagcctcccaaagtgctggaattacaggcctcagacatggtactggccaagaaaacaatctttttaaaaatataattaaaatactaaatttctgagaacaaatataacccaagaggtaaaaaatcttaacaatgaaagctataaatcaatgaaattagagaagacacaaataaattttaaaatatttcatatttatggaaagaataaatattgttaaagtatcatattctctaatctatagattcagcacaattcccatcaaaattccagtgaaatttttttttacagtaatgaaactataattttgaaatttacaagaaactacaataaactttgaatagccaaagcaatcttgaggaaaaagaacaaagcagagggacatcatactttataatttcaaactatatttcaagaatatagtaataaaaacaggagggaatgtgcagaaaattaacataaaaaccagcagaacagagaccactactctcacacattttagacatgatgcaaaaagataactaaaataatagtttaacacaaagttctcaaaatcatgcagatatttgtgtgtcccccaaaacaatggaaaagcagtcagattgtgcagtctcttatgtgccatgaagaggactttggctctcactgtgaacttgaaggaagatcaacgaagggaaagtagaatccttagagaatttaaaggcataagacagaagatgaccctatgtgagaaaaacaaaacgaaacacacacacctccggcttcccagaaactatttgctttggaacagagcttcccaaatcacactgtagagactggcttttgtttttttttaatcttccaacctttcatctatgtcaactgtttcatttagtctcacctacctggggtgtggctaccataccgtgtctcttcatattccagggatcttttccttgctcctgacagttgatcagatctggcctagagaaaccaatacctgctttattaaaaataaataacatgaatcttgctcttattctttaattaccaacctagtaccgtgcttagtaaagaggatgtaatagaatattccagaaaattaatcccaaactactacttaataacagaaagttcttaacatttagaaaatattttaaatttgtagctccttaatttcactacccagtactcatgaatcaaaaataagtgctggcaaatagattttaacatatgggcaacaatattttatactactaaatttttgaaattaccactactctggagtgaaggatacagaccagcttgggaaagtaaaacgttcaggccaagataaaacatcttgaagaaatttttttctacagagataatttctcaagattttttaaaaacaaagatcagaaattcctgtatgcaaagcataaattaccaaaaattattcaagaaaatagagaaatgaaacttttagggtatataaggaattgtgtattagagttattctcacccaagaagaccaggtttctgtagttctctaaaatcactttcctatacaaatcctgttgagcagtgtccaggcattgccactcctccagagagaatttgatggccacatccctaaatgtcaacggcccctgaaaaacacatgcgtgcgtgcacacacacacacacacacacacatatttacaagtgtcaatgggcaaaatttatcatttgaattatggttaaatgagagagtaaagaaaatttgttctgacttataggaatgactaaaattatccaacaattttccacacagaaatattctctaatgtattctctaactctgtgagaagagaatggtataagatccacaacaccagggcatagatgatacttttatgaataataaagtataaaactaaaggcataaacacaaacatgtacatttttagcactatatttgcatcataaagaatgagttgtgtatatttttcagacaaaaaagacatgctgagttagaaggcacctctcaagttttaatatgtataataaactgaagatcttgtgcagattttttttccagaagatctggaataaaatctgagtttctgaatttctaacaagctcactagtaatgccaatgcgtttggctgaaaaagaatattttatcaaacatctagtaagtgaaagaccctgtgttttacccaatttttctggcctggaaacaaagacaagagtcttcattcttcaaagacaggtatttgtaaagaaaactaagaaagaaaggcagctgccatattaaatgtgatggtttatgcacagctcttctttagctacacaaagatacttaataataaagagaaaaataattaactctatagtgaaataaatatttcagagagctctttaagtaaattgtaaaatcaactgcactaggatcaatttttatgatgtgctgatgcacacagaagaacacatcaccactgctgagatattgcccctcaaaaagtacagtctgaacttaaccatacagaaaaatcagttttatgcagagttcaagatgcagatatcttctatgtactgtaatttttaataacaatttaaagtagtctttctttagcaccctagagagtgggtatctctcaataattttttttcagaactttctgggtaataaatgctatcctgtttaaataagcattttcttagtcctgtactgcatagagttaatggagaaaacagatgaaacctcaacattacatgttctctatttttactaaggaccccagctttcccccaataggaatcttgaatatccatattttcccatttcaacagcaacaaagggaacatttttaatagtgccgattatgaattcctggtaagaattccacatggcatataagaagccatgatttagagagtgtagagaagactctgggatataggagagaaatattttgcagagacccttgactatcacaagaatttttttaagtagttaaaacaaattcattgggggaaaagaaacacaagtagagaagtgaaggtttgcaaggacttaaatgcatggcactccaggaggcagagtggacacagctcttcatctgacacatgtttagctgaaaaaaagccatttttcctcttttgtcttctttggaaatcctttccagatgacattctctggagaagttacacctgcatcttgagaaaattcctttaaagttgtcagcaccacctgtttacctgctagtctcacacccacagaaaaaagaactaagacctgtagaaaaagcccacccatttctgtcctttataacagcagagattcaggaacaatgagctgctccatgaatataaaaatatgtttctttatttttgtcttcaggtgctcgcccttgccacaaacaccagcaatttctgctacagtaatggaaatatgggtgacactgacctctccctatcaaacccaaacagaacagactctgtgaccaccttttagtgtaaaggagaaacttaactcttatgaatgtatcttgaaccccacacacttgattctgtcctcaccttagagtcacatgagacacaattaaaacaatgtgaatactttcacctagaacaataaacagaacctgtggagagagcctgtggagagtaaagagatgtctccaaattggccacataatcctcatgagaatcctgggctgataatcacttaactaagccttgcctctcaagccttaatgagctcaaaaatcacttggtaatgttggccccactctatgtaacgtgattctgcaggtttggaaagggtccatggatgggtgtttcaaaaaaatcccctgtcaatgctgatattgctccccctgggctcattattagcattagttagagaaaacaggcacagcacagtgtcccttacactcagcactcttgtcacaacacaaatatttctggtacaaataaagacaaaataacttcatcttaaagtatcatattctttgctggctccttaaagtttacagaggacacagaaggcaacaatgtctgaataagtctgcatttaaaaaacaacaggtacacatgaactaatgcaatgcttattaagtggcactatgttctcaagagtatgtaacagagcactgtgctgggaataacacactatgtgattaaatcctaataacaccttgagagttcatactaagttttcaataattctcaggatttagataaagggcccagaattattatttcttcctgtttctcaatcaccaattttaaccaataaactaaaagctaaatatagacagatgaagatatataaagaaataaagacataaaaagagtttaatgtagtttagagaatttttttgtttatatttacttgtttatgacttgcagagcaactactggatccgcaggaatagaaaacaagttgctaaatggaatgtttctgtaagcactggttttactacaaaatttagaaattaagatcttaaaatgtatactttacttttcttatgtatctgcttttggatttcaggatattgtgagcaaccgctctagaaagtcagcaggatttaacagccaaaacttgaatctttataaatcagttttgtaaggaaatactccagagttgggacagacctacaaggtctccaaaaagggtgaatctgatcagaactggggcagggagaggaacctatgtaaaatttgttctttatgccactggagtatttccagttctgtttttcctaagcttacctaagagaaacttaaatcccatagtttacgtaactttcatctatttttgccactgccctgtcaattttataacataaactaataaggaatttaaatgaatcttttaaagttttctaggataattttattaggagttaaatatgtattcttagaaaagtaaaacaaacccaaataacaacaacaactcttcagtccataaatatcccttcagataataacatcagaagtcacgccaatattaaaaaaaagtggctcaaatttttgtgtttttttttttttgcaaacatctattcaccgtactaataatataatgcttaattcaaccatgtattcagttgctagtctagactaaaagctcctagatggtagggaccatgactgcttcatccattttttgaatgaccatatgaaataaaagcaattagtttatttgtttgagtcacaagacctcctctttgtctttcacccaagtaccagaaaacttgagaaactctcgtctgggtaacaaccaaagttatctctcgtatgagggagaaaaaaacacaggatgattcctttctcttacaccaagacagaagcagaagaagagtgattacactcttgtcagcctgacacaattctgccctggacatcctcaaatgtctttaaaacacctaggtgattgtgagagggttcgcagtgacccagggctgatggcccagtgataagccaggctggagaaactcaggctgattctaaatagaaaatggaactgccatggtggagctccagaacctggatcacctatcctgatttgtgagcccttgggtatgaagaaggacaagaatactgtactccaatatcagaatttacaggtaagtatcattgtggtcatggctctggatactttgtggccttgatttctcactcttaagatgcttgtttatactcatggattctgtcatcagattctatttacacctggagcctctcacaaactgtagcaggtcactgaacaagattgaaaagcttaaagagccacactctcaaaggggagctttaagatgtctatgctgacatctaacaatgcagaaaatgccttctgttggttttcagtacattctcaatccaaagtacagccctgtcttgtaaatcccaggcagaggccagaccttatgtgcagattctaggtgggatcaacgggactctgcatccttgggtgttacagcaagcacagtacaatcaaaggggagattccttcatacaggctgctctagcacattctaagtaacacgtctacctaaaaggaaaaaactgaggcaacataaatataagtagagagttaatctaggccaagcttgaggattgtaaccttggagcaaagatacatcctccaaagactgaacaaataagaaattgaatccccgaatatagcaataacaagctccaaaactgaattagtatgaaataccctacccaccaaaaaaaaaaaacaaaaaaaaaaaacgaagaatgagacaaatttacagacgaattctaccagatgtcaaaagaagagctggtatcacttctactaatattatttcaaaatattgagaaaaagggactttttccccactcattatataaaaacagcattattctgataccaaaatctggcaaatataaaacaagaaatagaaaacttgaggccaatatttttaatgaacattgatgaaaatattctcaacaaaatactggaaaaccaaatccaggagaacatcaaaaagctaatccactatgatcaacttggctgtatctctgaaataaaaaattggttcaacatacaattaacaaatgttactcatcacataaacagaactaaagacaaaaaccacaaggttatttcagtagatgtttaaaaagctttcaataaaatttaccatcctttacgtttaaaaccctcaaaaaactaggcattcaaggtacatacatcaaaataatcagtcatctatgtatggcaaacttacagcaaacatactaaatggacacaagctggaagcattccttcatgaaaactggcacaagacaaggatgctttctctcaaaactcctattcaacatggaattgaaagtcttggccaaaacaatcagggaagagataaaagacattcaaacgggaaaaaagaaagtcaaactatattatccctatgtgcaggtgataagatgctatatcttcaaaaccctacagtctcagcagaaaagctctttaaattgataaacaacttcagcaaagtttcagggtactaagtcagtagcatccctgtacatcaacaatatcaagccaaaagccaaatcaaaaacataatcccattcacaactgccacaaaaagaatagaatatctaggaatgcagcaaaccagggaagtgaaagatctctgtgacaagaatgaaaatatactgcttagagaagtcagagatgacacaaacaaatggaaaaccattgtatgcttatgaatagaaaatattaatatcattaaaatggtcaaacagcccaagaaatttactgatttaatgctattcctatcaaactaccaaaaacattgttaacaaaatgataaaatattttaaaatttgtatggaaccaaaataagcctgatagccaagtcaattttaagcaaaaagaacaaagctggctggttgcggtggctcatgcctgtaatcccagcactttgggagtctgaggtggatggatcaggaggtcaggggttcaagaccagcctggccaacatagtgaaaccccatctctactaaaaatacaaaaatcagctgggcatggtgacgcatgcctgtagtcccaactacttgggaggctgaggcaggagaattgcttgaacctgggaggtggaggttacagtgagccaaaatcacaccactgtgctccagtttgggcaacagaatgagactctgtctaaaaaaaaaaaaaaaaaaaaaaaaaaaaaagaatgatgctggaagcattgcattgctcctcttcaaactacactacagtaaccaaagcgacattatactggtaaaaaacaacaacaacaacaacaaaaaacagactcatagaacaatgcaacagaatagagagcccagaaataatgccacacacctccagccatctgatatttgacaaagctgacaagaggaatgtaaaaagaatttcctatttaataaatggtgcagaaataactagctagcactgtatagaagattgaaactggtccccttgcttacatcatatataaaaatcaactcaagatgaataaaagacttaaatgcaaaacttaaaaaaaaaacctgcaagataaataacctagaaaataccattctaggcatagaaactagcaaagattacatgataaagataccaaaagcaattgcaacaacagcaaaaattgacaaattgaacctaattaaattaaaaagctttttcacagcaaaggaaaatatcaagagactaaccaatctacaaaattaaaaaaaatgcaaactattcttcttacagagatttaatatacagaattaagaaacttatgccaggcttggtgagtcacgcctataatcccaacactttcgaaggctgaggtgggtggatcatgaggtcagaagttcaagaccagcgtggtcaacgtagtgaaaccatgtctctactaaaaatacaaaaattagccaggtgtgggggcacacacctgtagtcacagctactcaggaagttgaggcaggagaatcacttgaacccaggagtcggaggttgcagtgaactgagaccacaccatttcatttcagcctgggtgacagggtgagaattcctctcaaaaaaaaaaaaaagagacttaaacaactttacaagaaaacaatatactacctcattaaaaagtaggcaaaaaaaaaagaagagatgcttttcaaaacaaatatgtgactaacaaaaatatttttaaaatgctcatcacagctgggcatggtggctcacacctgtaatcccagcactttgggaagccaaggggggtggatcacgaggtcaggagtccaagaccagcctggccaagatgggtgaaaccccatccttactaaaaatacacaaatacaaaaattagctgggtgcagtaccaggtgcctgtaatcccagcttctcaggaggctgaggcaggagaatcacttgaacccagggggcagagtttgcagtaaactgagatcatgccactgcactccaccctgggcgatggagtgagactccatctcaaaaaaaaaaaaaaatgctcatcacattagagaaatgcaaaaagaaagaaagaaaaaaaaagcctacaatgagataccatctcacaccagtcagaatggcactgttaaaaagtcaataacaggttgggtggggtggatcatgcctgtaatcccagcactttgggaggctgaggcaggtgaattacttgaggtcaggagttcaagaccagcctggccaacatggtgaaagtttatctctactaaaaatacaagaatcagtggggcatggtggtgtaaatctgtagtttcagctacttgggaggctaaggcatgagaatcacttgaacccgtgaggcggaggttacagtgagcaaagattttgtcactgcactccagtctgggtgacagagtgagactgcctcaaacacaaaagttaatagcagatcctggcaaggtttcagagaagagagaatgcttatacactgctggtgggagtataaattagttcaactattgtgaaaagcagagtggcaattcctaacagaactaaaaacagaattaccatcttccggcaacctcttaattgggtgatgtaattcatgtctaaattgaataactctctttttctcacttctgtagtatgcttccccctgcacagatctccccctactcacgaaatgcttttaaggaatcagacacccattggtctctgtgattctttaaaaatcccacaacattttctaggaacttgcctgggattgcagatgacagatttactgtctcctttgcctgtgggactagagccccagggccaggggagacctggcatccaaggtgcactgtgtgggagctccacccagatgtaaaccagctcttcccacatcccagcatcctgcccagcagcacaacagaactgaggatggggctgcaggatgataccagcacttcaggagctgtggtaaggagcaagggcccaaggcagggaagcccgtcccataaggatgaaggggagcttcatcacctcctggggaatgaccactaatccaacccagagtggttgggggcagcaggagtggcttgccaatttggatgaaacttgtgtccccactaacaaagtgaaagtggttcactggatctggagacaggaactggaaaaagggaggaaaggggccaatagaacagcaagtgcagcaaagtagagcttgctggcaaggtggcaagaatggcttgccaccacaactgggagtgtgtgggtgcatgtgaacccacccaggacatgagaggggttcgtttcatctgatgaggagtcctggggcaggggaggtgtgtgaaagagactgtctttggagaggccaacacggggagtgatgtggggaggcacagaacccttagcacgggctgtgtgctccaaggtaagagcaggggaaatcagacccaggatactgcatatggctgataggaccagttccacagctgcagcaggctgtgacaggggaaggcatgttcctggctaagcattgtccaaaactcctgtaataggacctgatctggtggatctgagagtgaaagtgagagcaaaagtgtgccccaagggaggaaatgggaggaaaagcatcaaaattgactcctttggaatgcatgataaataattttaaaaaaggatttagaggtgattataggattgaacttgatgctcaaaaattaaggacatactgtgagatagataggcctactttcaaagtggggtggccccctgaaggtacaatagacaggaaattaattggctatgtgtttaaggtggtcactggagttggaggacaaccaggatacccaggccagtttccctatgtagactcttggcttaatgtgccacaaactcaccccaagtggctacagccctgcctatgatattgcaaggcattagtggcttggggcagcccaaccaaaggaagcagaggaacctaaagtccctagcatctcccaggaaaaggaatccccaaagcctcagctgaaaccagttcttcaggccccacctgaggaaatgggatgtctgccccccatatgtgccagtctacctgtttttggcaagaatacacaggaggcagagttgggagcatctgaagagtcgggctcggaggaaagtgaggctcagtctccccaccaagtggaacagaagcccccattagaaaaaaacaaagaagatggaaagggtgatgcagctaggcacctctgctctggccaaccatgggctttgcagatgccactttgagagaccaggacacaagtttttgatgaccaggggcagatagaaggtggtcctaggcattatgttcatcagcctttctccactactgatctcttaaattggaaacagcacacaccctcctatacagaaaagcctcaggctctcattgatttggtgaattctattattatgacacataatccaacctggccagattgtcaacaatttttgctaactttatttcatacagaggagcataggagagttaatcaggcagctctcagctggttagaaaaggaagtcccagaggccacccctaacccatgccagttcgctgaggagcaatacccaaatgatgaccctaactgggacccaaatgaggcaagggacattgaacagctgcagctatataaaagggcactcctgaatgggataaaagcaggaggaaggaaagcaatgaatatgagtaaaatatcagaagtgcactgaaagcccaagtgcattcaatgaaaggctttgtgaggtatataggctgtacactccaattattccagaggctcctgaaaaccaaaatatgacaaatatgacctttgtcagtcaagcacagggagacataagacaaaagcttcagaggctggaaggctttgctggggaaaatattagtgaactcatggaaatagcaaacaaagtatacataaactgggaggaagaggcagagagaaaggaagaaagaacaaacagaagtaggaacaaggagacagcttaatttatagctgctgcactagcagaaagtaaccctggatttgctagaaggcatggccaaggcagaggctgaggaaggaagcaaacaagactgggagaagaaagctggacctggttggacaggaaccaatgtacaaggtgcaggcaaatgggccactggaaagatgagtgccctgaataggaaaaggatggaaatgatggtcaatggtctaacatctgagtgcagtatttggttgctagtcatggcacctcaaaggcagatcccgatctgatcggcttagcaggggccaagaattttgaggactgagacagactgggctccatctttttaggggagcctatggtctctatggaagtagggggtggttaatggattttttggtcaatactggtgctgatttctctgtggtaactcacccaattagccccccctaaaaataactgtgctactatcgtaggggcttccagggccaaagaaaagagacctttttgcaaatccaggagatgtgttattggagaacaggaggtgcagcacgactttctatatatgccaaattgcccagtgcccttgttaggaagggacttactccagaagctgcaggcacaaatttcctttacacctaataggaatatgacccagagatagggaagccaaaggcaatggtattgactctaattgccccaagggctgaggaatggtggctctaagaactgtgtacaggaggctgccagagccagacctacacaatatgcaggtaatacggggtaatatgtgggtaatatgtgggggctgaggacaaccgccctggacttgctctaaacagaccccaatggtagtagagcttaaccctcatgctgccccagtacaagtccatcaatacccactaccctgagaggcaattgatagaataacaaagcatctaaattggctttatatgcatgagattatagcaaaatgcaagtcctcatggaatactcctctgttacctgtgcgcaaaccaaatggggaatacaggccagtgcaggatctctgggcagtaaacaaagctgctgtcactattcatgccatagtgcccaacccatatacaatgctgggacagattcatgctgatgccacttggttcatgtgtctggacttaaaagatgccttcttttgtttgaggcttgctcctcaaagtcagcctgtatttgctatccagtgggggaaatcacaatatacctggacaaggctgccacaagggtttgagaattctaccatttttgaggaggccttggctacagatcttgaggcttttttgccacctagtgacaattgtgtgctattataatacattgatgacttgttattcactgcccccatgagggaggaatgcttccaaggaacagagaggcttcttcacctgctacgtgaagctggctgtaaagtgtccaaagacaaggcacaagtctgtttttgagaggttggatatctaggattcatggtatcccaaggccaatgcaggcttggaagtgcatgcaagaaggctgtatgtgcattatcaaccccagttacaaggcagcagggaatttctaggcatggcgggattctgctgaatctggattccaaacttctcccttatagcaaggcccttatatgaggctaccaaaggtgggtaaagagagcccctcctatgggaaaaggaaaaggaaaaggccttcaagggtataaaggaagctctcatccaggccccagcactaggattgccagatataaaaaagcccttctttttgtatgtggatgaatgaaagggaatggcagttggagtcttaactcagttgttgggctcttggcactggccggtaccatacttatccaaaagactggacttggtggccttagattggccctactgcctcagggcattggcagctaccacgacccttatagaagatgccaacaagctagccctaggtcagaagttaataattcaggtgccacacactgtagtcaccttaatggagcaaagagaacatcgttggctgtccaactctagaatgctgaagtatcaagggcttctgtgtgcaaatccctagacaacattaagactgtaaataccttgaacgcagctaccctgcagcctatggaagaacctgattggaaggatggtgagttacctcactgctagtaggaccttccccactgttgcataaatacagtgggcaaagtgttctcaagccaggaagatctcagagatacccccttggagagcccagatgttgaatacttcactgatggtagcagtttcataacacatggggtgtgatatggaggatatgcagtagtgacacaacacttggtggtcgaggctcaagccttaccttctgggacttctactaggaaggctgaattaataacattaactagagcacttttattggccaaggggaagaaagtaaatatatatacttctcaaaatatgcttttgcaactctgcacacccatggggtgacatacaaagagagaggactttagactatgagaaaaaaagaaataaaaaataaaaaggaaattctacaattattagaagccttatgggctccagagaaggtggctgccattcattgcagaggacaccaaactgggaaaagctataaggttcagggcaacagaaaggtggacccagaggctaggcaggcagcaatgaacaaggctttacctgtaaaaagaactctagcaatgcctctccttatagagccccctttgccagaggtacccaattactctttaagtgaaaaagcttggtttaggcaggaaacagggaagtatattaaaagtggatggtggctgttctctgatgggaggctagccatcccagagacaatagccccaaggtttgtgaagcagatccatcaaggaacacacattggaaggatggccctagagactgataggttgacacttctatgtgccacagctctctgcaaccacctgtgctgtttatgaacaatgtatgtctatcctgtgccctgaataatccaaaataagaacccactcaacccccaggaattcaggaaatgggagctgtgccttttgagaacctgcttgtagactttaccgagttgcctcaagcagaatgttactggtatatgctagtgtctgtttgcaccttctccaggtgggttgaggccttccctaacagaactgaaaaggcatgagaggtgacaaagctgctactaaaagacatatagcaaggtttggatagcctttaaccataggatcagacaatggtcctgcatttgtggcagaagtagtacaacagttgactcaacattttttttttgtatttattgatcattcttgggtgtttctcggagagggggatgtggcagggtcataggataatagtggagagaaggtcagcggataaacacatgaacaaaggtctctggttttcctaggcagaggtccctgcggccttccgcagtgtttgtgtccctgggtacttgagattagggagtggtgatgactcttaacgagcatgctgccttcaagcatctgtttaacaaagtacatcttgcaccacccttaatccatttaaccctgagttgacacaacacatgtttcagaaagcacagggttgggggtaaggtcatagattaacagcatcccaaggcagaagaatttttcttagtacagaacaaaatggagtctcctatgtctacttctttctacacagacacagtaataatctgatctctctttcttttccccacacttcccccttttcttttcaacaaaaccgccattgtcatcatggcccattctcgatggttgctgtctcttcggagctgttgggtacacctgcagaaaggctgttgcttcacacttggaagattgaacagcggccaggcagaggtgctcctcacttcccagatggggtggcggccgggcagaggcactcctcacatcccagatgatgggcggctgggcagaggcgctcctcacctcccagacggggtggccgggcagaggcgctcctcacttcccagacggggtggccaggcagaggtgctcctcacttcccagacggggcagctgggcagaggcgctccacacttcccagacggggtggccaggcagaggtgctcctcacttcccagacagggcagccgggcagaggtgctcctcactttgcagatgaggtggccaggcagaggcgctcctcacttcctagacagggtggcagccgggcagaggtgctcctcacatcccagacaatgggcggccgggcagaggtgctcctcacttcccagacggggcggccaggcagaggcactccccacttcccagacagggtggccgggcagaggcgctcctcacttcccagatggggtggctgctgggcagaggcgctcctcgcctctcagacggggcggccaggcagaggcactcctcagttcccagacagggcagccaggcagaggtactcctcacctcccagatggggtggtggccaggcagaggcgctcctcacatcccagatggggcggccaggcagaggcactcctcacttcccagacagggtggcagccgggcagaggcattcctctcatcccagacggggcagcaaccgggcagaggcactcctcacatcccagacggggctgccgggcagaggcgctcctcacttcgcagatgatgggcagccgggcagtggcgctcctcacttcccagatgatgggcggctgggcagaggtgctcctcacttcctagacggggcggccaagcagaggtgctcctcacctcccagatgaagggcggccggggagaggctctcctcacatcccagacgatgggcggccgggcagaggcgctcctcaccccccagacggggtggccgggcagaggcgctcctcactttccagacagggtggccagccagaggcgctcctcacatcccagacggggcagttgggcagaggcgctcctcacttcccagatgataggcggccgggcagaggtgctcctcacttcccagacgggacggccgggcagagatgctcctcacctcccagacagggtggccgggcagaggcgctcctcacttcctagatggggcagccaagcagaggcactcctcacctcccagatgaagggcagccggggagaggctctcctcacatcccagacgatgggcggctgggcagaggtgctactcacttcccagacagggcagctgctgggcagaggcgctcctcacctctcagacagggcggccgggcagaggcgctcctcagtacccagacagggcggccaggcagaggcactcctcacctcccagatggggtggcggccgggcagaggcgctcctcacatcccagatggggcggccgggcagaggcactccccacttcccagatggggtggcggccgggcagaggcacttctcacatcccagatggggcggctgggcagaggtgctcctcacttcccagatgatggacggctgggcagaggtgctcctcacctcccagacagggcggccaggcagaggcactcctcacttcccagacggcgtggccaggcagatgcactcctcacttcccagacggggtggcagccaggcagaggtgctcctcactttgtagacaggatggccgctgggcagagatgctcctcacctcccagacagggtggcggccgggcagaggcactcctcacctcccagacgggttggccgggcagaggggctcctcacatcccagacgatgggcggccaggcagagacgctcctcacttcctagacagggtggccgccgggcagaggctgtaatcttagcactttgggaggccaaggcaggtggctgggaggtggaggttgtagcgagccgagatcacgccactgcactccagcctgggcaatattgagcattgattgagcgagactccgtctgcaatcccagcacctcgggaggccgaggcgggcagatcactcgagctcaggagctggagaccagcccagccaacacggcgaaaccctatctccaccaaaaatacaaaaaccagtcaggtgtggtggcgcatgcctgcaatcccaggcactgggcaggccgaggcaggagaatcacgggagcccgaggcagggaggttgcagcgagccgagatcacggcagtacagtccagcctcagcaacagagggagaccatagaaagaaagaaagaaaggaaggaaggaaggaaggaaggaaggaaggaaggaaggaaggaaggaaggaaggaaggaaggagggaaggaagaagagagagagagaaaaaaagaaagaaagaaagaaagaaagaaagaaagaaagaaagaaagaaagaaagaaagaaagagaaagaaagagagagagagaaagaaagaaagaaagaaagaaagaaaggaaggaaggaaggaaggaaggaaggcaggcaggcaggcaggcaggcaggtgactcaacttttaaagatcaaatggaaactgcacacagcttactgaccacagagttcagagaaggtggaatggataaactggacactcaaacagctactaaaatagttttgccaggaaactcacttatgatgggatcaggtcttgcccgtggtcctcctccaggtcaggtgtatgcctagaaaacaaactggatattcgccctatgaaatattgttcagaaggccacccccaatcattaatccaattagaggggatttaaaggagttaggagagctaacccttagaagacagatttaggctttgggagtggcaatgcaggaggtgcaaggctgggtaaaggaaaggatacctataagtctaacagacccagtgcatccacataagctgggagactcagtctgggttaaaggtggaatccaacaaccctggggcccttataggatgggccctatattgtgatcatgtctggtcccactgctgttaaagttccaggtgtcacaccttggattcaccatagccggctacagccagtggcagcagtaactctcaatgacaatcagtggattagccaacaagacccagattgccccacccgaatggtcctatggtgaaacccaactaccagtaagaaggacaactgccctgctctgaccactctggaggctggtcagtctacacacggctgaagcttgaggatcctgcaagctctgctctagtcacatccaggaagctgactagtctacacatagccaaagctaagaggaccatctctggataagtaaatgtggatacaatttataagcctagttataatcctgtcaatactgattgttctgttgttatgttattactgcaaatgcttcaaatgtctatacccagaggaaggtttgccatgcccatgtgtagtgtaagcatgtttctattacatacactaatgttgttaccatttctgcatatactaaaagaggaactcttaggatatccagtttatgattaaaataaaagaattagaagaagcataatcacaaaaatagacacaaatatcaaaaaggatgtggtcataggagactggaaagataatgaatggcctactgaaagaatcattaaattctatgggatggctacctgggtgcaagacgggtcatgggggtaccatacccccatctgtatgctcaagcacatcataaggttgcaggaagtccttgaaatcataaccaataaaacatcaagggcactagatttattggcaatacaagcaacacaaatgaggaatgctatgtatcaaaatagattggctttagattacctcttagccttggaaggaggagtatgtggaaaatttaatttaaccaactgttgcctagaaatcaatgatagtggctgagctctcatggaaatcacagctacaatgtgcaagttggcccatgttccagttcagacttggttcagttggtccctggattccttgtttggaggaaggttctcagcctttcgaggattcaaaaccctcattagtgggttcttacttactcttggcatctgcctcatcctcccttgccttttacccctgtttattaggagcattcagtcaactacggaggcaatagtggcctgacacactatcatgcagttggtggtatttaccagatatcagctgctgccaatcgaagaagaagctcatctccacgaaaaggtggcaaatagtagtgcttcctattaacacctctgttataaaaagcaccaaaaaggggaatggaacaggaattgaaagaaattaaagtgtgtaagcagaaactcagttgtatgtaagaaaacctaactcctcctgagaaagagaaagagctggagtcctttaaaaactaactgcctgtttttctgtggctagtgagctttatctctcctgccttccaaggcattgtgaagactttgttttcctagctgtgcagctgctaggtcactagacagatacactcaagttgcaaaacatgtttttccttgaaaagtaagaaatgatgtaatgcatgtctcaattgaatgattgtctttgtttctcacttctgtagtacgcttccccctgcacagatctccccccactccacccccatgaaatgcttaaaaggtaacttaactctttgttcggggctcagtcctttggatgttaatccgactgggccagtgcacctaaataattataaatatcctcctgaatcccatcggtctctctgattccttaaaaatcccacaacatgggtatatacccaaagaaatataaattattccaccataaagatatatgcactctgggaagtgaggagtgcctctgcctggccgccgccccatctgggaagtgaggagcgcctctgcctggccgctgccccatctgggaagtgaggagcacctctgcctggctgcccactgtctgggatgtgaggagcccgtctgcctggctgccccatctgggaagtgaggagagcctcagcccagccgccaactgactggtatgtgaggagcacctctgcctggcttctgccctgtctgggaagtgaggagcaccttggcctggccaccaccctgactgggaagtgaggagcacctctgcccagctgcccactgtctgggaagtgaggagtgcctctgcccggctgctgccccatctgggaagtgaggagaacctctgcctggctgctgccttgtttaggaagtgaggagcacctcggcctggacgcctccctgactgggatggcaggagcatctctgcctggccgccactgtgactgggaagtgaggaacgcctctgcccagctgcccacagcctgggaagtgaggagcacctctgcccagcagcccaccatctgggaggtgaggagcgcctctgcccagctgcctacagcctgggaagtgaggagcacctctgcccagcagcccaccatctgggaggtgaggagcgcctctgcccagctgccgccccatctgggaagtgaagagctcctctgcctggctgctgccctgtctgggaagtgaggagcgcctctgcccggctgcccaccatccccccgatctgggaagtgaggagtgcctctgcccagctgcccaccatctgggaactgagaagtgcctctgcccagctgcagccccaacgtctggcaagtgaggagcacctctgcctggccgccgccctgtctgggaagtgaggacggcctctgcacagctgccacctcatctgggaagtgaggagcgcctctacccacccccgccctgtctgggaagggaggactgtctgggaaatgaggactgcctctgcccagctgcctccccatctgggatgtgaggagcacctctgcctggcgactgtgcaaccttccgagtgtgaagtgacaaccttctgtgtgatcttttctgtcttccccaagtttgcatttttgacattaaagtttactttttaattaaaagttttaaattgggaaacattaaaaaaaagacgtgcacatgcatgttcatttcacccctgtccacaataacaaagacatggaataaacctaattgcctgttaatagtagactagattgaaaaaatatgatgtggtagcacgaggtggctcacatttgtaattccagcactttaggagatcaaggcaggtggactgccttagctcaagagttcaagaccagcctgggccgagtgtggtggctcacgcctgtaatcccagcactttgggaggccaagacgggtggatcacgaggtcaggggatcgagaccatcctggccaacatggtaaaacctcatctctactaataatacaaaaattagctgagcatggtgcacatacctgttaccccacctactcgggaggctgaggcaggagaattgattgaagcagagagtcagaggttgcagtgagccaagatcgtgccactgcactgcagcctggtgacagagcaagactctgtctcaaaaaataaaataaaataaaataaaataaaataccagcctgggcaacatggcaaaactgtatctctacaaataatacaaaaaagaaaaattaggcatgatgttgtgtgcctatagtcccagttacttaacgggctgaggtaggattccttgagccttgagacttggatgttaaggctgaagtgagccaagattgcaccactgcactccagcctgtgtgacagagtgagacgctcttccaaaaataaaataaagatttagtaaaaacaaaatatggtacacaaaaatcgtggaagactacgtgaccatataaaaacaacacaaagccaggcaccatggctcatgcctctaatcccagcactttgggaggctgaggtgggtggataacttgagatcagaagttcaaggccaggctggtcaacacgctaaaaccctgtctctactaaaaatacaaaaagttagctgggcatcacggcaggcacctgtaatcccacctactcaggagactgaggcaggagaatcgcttgaacttgggaggtggaggttgcagtgagccaagatcatgccaatgcactccagcctgagtgacagagtaagaattcatcttaaaaaaacaagcaaacaaacaaaacacaccaagattaagtccttcgcagcaacatagatggagctagagaccattattgttagaaaactgatgcaaaaacagaaaaccaaatgcatgtgattatttataagtaagagctaaataataacacagggacacaaggaaggaacagtcactgaggcctggttggggatgaaggataaaaggacaaagaggatcagaaaaaaatacctctttggtgctatgtttagtacctcagtgacaaaataatctacaccaaacccccatgacacaattttacccatataacaaacctgcacgtgtatgcctgaaccaaaaagaaaagttaagaaaagaaaaacccacgagtgcagaagagcgcagtgtaactggaaagaattgtttgttctacagatagtggtcctggtggggctgtactctgatttatttctgtgtccatgcaggcagatgagattatgaacaggtgctccataatgctaggtagatggagaaaacaggatgctgtggcagattcagtgtctggggtggggatatgccaggagacttgtagacacttttgtggctttttggcaagaaacactaggatcaaaaatgctgtggtgaagttcctgatggtggtgcctagtcccaggaggactgtgaacacattaatgtccagtaggtttgtttgtgagtgggtgggaatgctggggtgacagctgtgagacaagggggtctgtcattagaggtcctttcctctgagttttcattttctctcaccctgggaggagacctggaatcacagaacaacaggtagtgtgacagcctgtgtacaggagagcagagcctcccatttccagacacccagagttccatttgaggtcaggcctctgtgatatctttcttctggcaccaaatctgtagagtttgctgaacaagcaattctctaacaccaactcaatgtctaacatttgaattctgacaccacccagagtcagcacagactctgattcagggctcagttccacaacattgtcctcattgcagatgccagtcacaaaccccataggcccatctatgtgtctgagatactgtttaaaaattggggactcccgagccctttctcaagttcaattatctgatcaacctactcacagaactcagaaaaacactgtagttatgtttaccagtttattataaaacatacaactgaagaaaagtccaatggaagacatgtataggacaaaaaaagaggtggaaagctgaaacacatacataaccctggtaaatagggtaaatagctgtgattaataaaattcttcatcctttgtgttctccaggaatagtttatagaaagaaacactcttcctattatgacttaagatggtgctcttttttcttatttattacagagccagacacagactctgccagaggtacacagcctccattttgaataggggctgagtaaaataaggctgagacctaccgggctgcatttccagatggttaggcattctaagccacaagatgagataggaggtcagcacaagatacaggtcaaaaagctggcttgcagtaaagaagcgggataaaagccaccaaaaccaagatggtgatgagagtgacctctggtcatcctcactgctacactcccaccagtcccatgatagtttacaaatgccatgaaaacatcaggaagttacaccataaagatctaaaaaggagaggcataatccaccttttatttaacatataattaaaaattaaccataaaaatgtgcaaccagcctaaggagaaagccatttcttttatttctttacttccttaataaatttgctttcaccttactctacgactcgccctgaattctctcttgagcaagatccaagaagaaactggaaatttagtatcttattgcaagctagattgaggctggagaaatgggggatgggtcccaagaccctgcctgggacacaggtgaaaaaggcagcagaaaatcagttccccgtggagtgtgaaaataattaagtggcaggaaattagagtgaggtgtttctagtccctgggttcctacttcaaaaaaacaaacacaaaaatctaactcaggtgcattatttttaattaccacattcaaagaaacaaaattcaggcttcagcaactatcaactgccaattaagttctgattacttaatcaggactttttcacctttaatgtacaaattaagacactatgtaaaaaaaaaacacatcacgtggctgggtgcggtggctcacgcctgtaatcccagcactttgggaggctgaggcgggtggatcatgaggtcaagagatcatgacgatcctggccaacatggtgaaaccccatttctactaaaaagtgcaaaaattagctgggcgtggtggcttgcacctgtagtcccagctacttggggggctgaggccggagaatctcttgatcctgggaggcggcggttgcagtgagctgaaatcgcaccactgcatgctagcctgggcgacggagcaagactccatcaaaaaaaaaaaaaaaaaaaaaaaaaaaaagaacacaaaacaaaaaaggctgggcacagtgtaactgtaccatgtaactgtacctaaccaattattaaacttggttttcttcatcatgcattttataaaagactttccttcaagtctctcccatagaccacaaactacaaaccatagctgggtgctctacaattctagaaccactctttgattaagttatttaatatttttgcagtaactcccataaatttttaataggagaaaataggaactgggacccccacgcacgaaagttcttcctatttatgaaccgcatcccaagtcaggattctcccctgatgaccctcccgtggtccctgcacaatctgagagagatgcagggccgcgggtgcagagctgcccagagagggcaccaggccagggcacagtcactgcacagggaaaagacaggacacccagggcgctggctgtcggcacagccaccatattatggctgaaggggactgaggctgagatgggccaggagaacttgggtgcagattgtggagctgactgctgggaggcctaagtcctaccacgaccacttcccactggttccaaccagccccttccgctctctcaggatgtcggacccagcactctcaccatttctaggcttccagggcgtcccgttttagctgtggatctcccaatacctgcaggtcacagggctacagaggctaggcctctaggagcagaagacacagagcagtgaaaatgagacctggagctccagctgcagcaagagacaaaggactccccacatcccagaagccatcctctccactccagctgcgcctgattggacagttcccagcccagcgttgctgattggataatgtttaaaaccccaccctctcaggccttgactgacagaagatgtgattagatgctgggttgaatgaagaaagagtgacagcctaggctgcagccttttcaggcagggcttactgtcagagatgagctaggcccaccttacagggtatttgcattcaaccttgtgtataaggtcatatgcttttgtaaataatgtgtcataaatcctctgaaataaaattttgaattttctagtagccaaactttaaaaagaaacaaggggctgggcatggtggctcctgcctgtaatcccaacgttagggtgaagcaggcaaatcatgaggtcaagagattgagaccatcctggccaacatggtgaaaccccgtctctactaaaaagaatacaaaaattagctgggtgtggtggtgcacccctgtagtcccagatacttgggaggctgaggcaggagaatcacttgaacttgggtggcagaggttgcagtgagccaagctcgcaccactgcatgccagcctaggcaacaagagcaaaacctcatctcaaaaaaaaaaaacaaaaaagacaattgaataaaatttttgtataaatatttacatagcccatcaggtatcagaaatgtacataaagttttgattgtcttctcaggattatatatttgaccaaaaaaaaaaggtcctaacccattttagtaatctataatagtaaccaaacacacagacacaaacacccacacacacacttcatttattaacttagattattttttctctcttctgtgatgagtaattaaatgcagtgtttttgataaaagaagtttttttttttttcctttctgatcttggttatttctttacttctgctgggtttgggtttggtttgtttttgtttctcaagttccttgagatgtgaccttagattgtctatttgtgctctttcagattttttgatgtaggcatttaaggctatgtactttccacttagcttcacctttgccatatcccagatgttttgataggttgtgtcactattattgttcagttcaaataatttttaaatttccatcttgattttattgttgacccaatgatcactcaggagcatgttattcaattttcatgtatttacattgttttgaaggttccttttggagttgattttcgattttatccccctgtagtttgagagactacttgatataattttgattttcttaaatttattaagagttgttttgtgtcctatcatatggtctatcttagagaaagtttcacatgctgatttgggaacttcagtgttaggtgcttatatatttagaactgtaatatttttctgtttgacagggtttttatcattatataatatcccactttgtcttttcttaactgctgttgttttaaagtgtgtttgtctgatatatgaatatctacttctgctcatttttggtatccatttgcatggattttttttttcacatttttaccttaaccctagtgtgttagatgagtttcttgaaggcagaagatacttggttggtgaattcttatctattctgcaattctatatctttcaagtggaacatttaggccatttacattcaatgttactattgagatgtgaggtactgttttatttatcatgctatttgttgcttgaatactttgtttttataaaacattttgttgtattcatattttataggccctgtgagatttatgctttaaagaggtcctgttttgatatttttccaggacttcttagagttccttttagcagtttttgtagtgctggcttggtagcggtgaattctctcagcatttgtttgtatggaaagacattttttccttcaattatgaagcttagttttcctggatacaaagttcttcactgatagttggtttgcttaaggaggctgaaaatagggtcccaatcccttcttgcttgtagggtttttgctgttaatctgataggtttttattttgtatatttttaggttacctggtgcttttgcctcacagctcttaacattctttcctttgccttgactttagataacctgataacaatttgtctaggcagtggtcattttgtaatgaatgtcccaggtgtttttgagcttcttgtatttgaatgtctaggtctctagccaagaaagaaaagtttacctcaattactttcccaaatatgctttctgaacttttagatttctcttcttcctgaggaatgcaaattatttttaggtttggtaatttaacataattccaaacttcttggaggctttgctgatttttttattctttctgtttgcctttgttcgattgggttaattcaaaaatcttgttttggagctcggaatttctttcttctagttgttcaactctattactgagactcttcagtacattttgcatttctctaagtgtgtttttatttcctgaagttgttattgttttttatttattctatttttttcactgaagatttctcccctcatatcttgtattattcattgatttccataaattggactttacatttctatggtacctacttgattagtttaataattgactttctaaatttttttttagacactacatggatttcttcttggtttggattcattgctggtaaacttgcatgatttttgggtggtgctaaagaacattgttttttcatattaccagaattgtttttctggttctttctcatttgggtagactgtgtgagaggggagatctgggggcttaaggctgctgtatagattcttttgtcccacagggtgctccctcgatgtaataccctaaccctttttctagggatgtagcttcctaagagctgaactatagtgattgttatttctcttctggacgcaggtctattagtctctgggctggtacttgagggtgtctgcacagagtcctgtgatgtgaatcatcttcaggtctctcagccatggacaccagcacctgctgtggtggaagttgcagaggagtgaaattgactctgttgcatccttaattgtaattgtttaatgaactagttttttgctggttggcctcctgccaagaggtggcaccttcaagagagcatcagctgtggtagtatagggaggatcagctactggacaggaccctagaactttcaagagaatatgaattttgtctttgtctaccagagtgggtagggaaggaccatcaggtgggggcagggttaggcaagtctgagctgagactctcctttggaggtgcttgcagtggctgctgtggtgggatgaggtgtggttcccaggtcaatggagttatgttcccaggaggattatggctgcctctgctggtgatgcacgttgtcaggaaagtgggaaaaagcagacagtcacaggcctcacccaactcccacacaacccaaaaggccagtctagctcccatgatgcctctccccccgacagcaccaggttagttttcagggagtgggtgagcagggctgagaacttgccccaggctaccagcctcctggcaaagagagcaagcaggacttttacacctttccacctgtcaagtctgcacattggattcacgccctcctctgagttctggcaagaaaacttcacgtttggttggaattgttacaaagttaagctggaggtaaaaccattttatatttttaataaaatatttttttcaaactttctgctaacttacagatctaaatatatttagcttttctatatcatataaaaataagattctagtcaggcatggtggctcacacttgtaatcccagcattttgggaggccaagaaacaaagactgtttaaacccagaaatttgataccaacatggcaaaatcccatgtctacccaatatacaaaaattaacatttgggcacggtggctcaagtgtgtaatcccagcactttgagaggctaagacaggcagatcacaaagtcaggagattgagaccatcttagctaacatggtgaaaccccgtttctactaaaaatacaaaaagtttgctgggcgtggtggtgggcacctgtagtcacagctactcaggaggctgaggcagaagaatcgcttgaacccaggaggcagagcttgcagtgagtcgagatcatgccactgcactccagcctgggcgacagggactccgtctcaaaaaaaaaaaaaaaagaaagaaaagaaaacaaaaattagctgggcatggtggccagtgcctgcattacctgctattcaggaagctgaggtaggaggatggcctgagcccaggagcttgaggctgcagtaagccatgatcaatctactgctctccatcctgggtgaaagagtgaaatcctttctaaaaaaatgccaaagcatagcaacgtaaacttctgtgggtttttttaaattgttgttattattattctaagagcttttgaggtaaaggtgttgtttggctacataggtaagttcttcagcagtaatgcctgagatttaggtgcacccagcaactaagaagtgtatactgtacccaatgtgtagtcttttagctctcaccctcctcctgctcttcccctcaagtcctcagagttcattatataattctcatgctttggaatccccatagcttagctcccacttgtaaatgagaacatacgatattgattttttattcctgagttacttcacttagaacaatgatcttctaatccattcaagttgctgtgaatgccattactccattttttaatggctgagtattacatggtatatacatatcacattttcttcatccacttgatggttgatgggcatttagggtgcttccatatttctgcaattggaaattgttttgctataaacatgactgtgcaagtgtcttttttatataatgacttttttcttcatgtaaatgcccagtagtgggattgctggatcagatggtagttctacttttagttctttaaaaaaatctcctggctgggtgtgctggctcaagcctatattcccaacactttgggaggccaaggtgggtaaatcacctgaaatcaggaatttgagaccagcctggccaacatggtgaaaacctatctctactaaaagtacaaacaaattagccagtcatggtggcatgtgcctgtagtccaagctactgaggaggctgaggcaggagaatcacttgaacttggaaggcagaggctgcagtgagctgacatcacgccactgcactcagcctgggtgacagagtgagactccatctcaaaaaataataataataataaaaattcccagctgttttccatagtgattgtactagtttacatttccaccagtagtgttaaaatgctccattttcatcaaatccatggcaatatctagttttttgatgttttaattgtggccattcttgcaggagtaaggtggtatcacattgtaattttaatctgcattttcctgacaattagtgatgttgagcattttttttcagtattcacattttttatttcaaggtgtaaaatatatgtgtccagtattgttactttcatctgcagatggaataattgggaagtataaaaacctgtacttgacttttttttgtttttgtttttgagacagagtctcgctctgtcatccaggatggagtgcagtggcacgatctcggttcactgtaaaccccgcctcccgggttcaagtgattcttctgcctcagcctcttgagtagctgggaatacaggcatgtgccaccatgcctggctaatttttgtatttttagtagagatggggtgtcaacatactggccacgctggtcttgaactcctgacctcatgatccacctgcctcagcctcccaaaatgctgggattacaggcatgagccactgtgcccagccttgtacttgatattttatcaagattatctgccaacaagttacccatattcgggtttcaatgagcctggaatcttctttccacttgataggggtatgtattaggaaatccagttgatgacatttttatttaaaaaatcaaaaagaatcagcacagtcaggttgtcttagtcttaaggatttctggattcctttcttggaggaggtcaggatctttccaaggcttgggtccttggatattcttccagtcatcaaaagtggagtcttttctcatattctgactctaatgatactatttgctttcagtttttttccaactcaggatcaattttaatcttcactgcatcatgtcagatttgtaaaaactcacgaacaccaaaagaaactccaacaattagcaacaacatggggacttcgtagtggagagtcttattcttgcgcaaagcacgcatcactgcgggtgcaaacgactgaactcttccacccgtttagaactgcaagcaggcccaacgcagattctcaaatctcagtggtccaagctctcatcaagatgagactcaccaactttccttggttgtttggtgttcggtccttactgataggtttccaagcattttttaaatatgtttgttggccatttgtatatcttcttttgagaattgtctattcgtgtcattcgtccacattttcatgggattatttgtttgtttgtttgtttgttttttcttgctgatttgttcaagttccttgtagattccgggtaacagtcctttgttgaatgcattggttgtaaatattttctactctgtgggttttctctttactctgctgattacttcttttgctgtgcagaagcttttcagtttagtaagtcccatttatttatgatttttttttttttgcatttgctttagggttcctggttacaaactctttgcctaagcaaatgtctagaagcgttcttctgatgttatcttctagaatttttatagtttcaggtcttagatttcagtctttgatccatgttgagttgatttttgtataggatgagagatgaagacccaattttcttattctacatgtggcttaccagctatctcagcaccatttctttaacaggctgtcctttttttttttttaaaacggagttttgctcttgttgcccaggctggagtacaatggcacaatcttggctcactgtaacctctgcctcctgggttcaagtgatgctcctgcttcagcctcctgagtagctgggaatacaggcgcgtgccaccatgcctggctaattttttgtattattagtagaaactgggttttgccatgttggtcaggctggtcttgaactcctaacctcaagtgatccacctgtcttggtctcccaaagggctgggattacaggcataagccactgtgcctggctaatttttgtagttttattaaagatgaggtttcaccatgttggccaggctggtctcaaactcctgacctcaggtgatccacctgccttggcctcccgaagtgctgggattacaggcatgagccaccacgcccagccttagggtgtcctttttatactttgttttcgttaacagtgtcaaaaattagttggctttaagtatttgggttcatttctgggtatgaaattctgttgttgttctacatgcctatttttataccagtaccatactgttttgataactatcaccttttgatatagtttgaagttggtaatgtaatgccttcagatttgttcttattacttagtcttgttttggctatgtgggctttttttggttcaatatgaattttataattgtctttttttgttttagttctgtgaagaatgatgatgctatctttatgggaattgcatggaatttgtagattgtttttggcatcatggtcatgttcacaatagtcactctacttatccatgagcatgaaatgtgtttccatttgtttgtgtcatctataatttatttcaagtgttttgttatttaccttgtagagatcgtttgcctccttggctaagtatattcctaattattattattattattattattattattattattattattatttttcagctgttgtaagaggggttgagttcttgatttgattcctagtttgggttgctatttgtgcatagcagtgctactgaattttgtacattgattttgtatcctgaaacttcactgaattcatttatcagatctaggggctttttggatgagtctttagtgtcttttaggtatacaatcacatcatcagtgaacagtcacagtttgacttcctcttttccaatttggatgccctttatttctttctcttgtttgaatgctctggctaagaattccagtactatgtcgaatagaagtggtgaaagtgaacatccttgtcttgttctagctctcaggggtaatgctttcaaatttttcccattcagtataaggtgggctgtgggtttgtcataaatggcttttgttaccttaagctatgtcctctctctgccagttttgctaagggttttaatgctgaagtgatgctggattttgtcagatttttttctgagcctattgagataatcatgtgatttttgtttttaattctgtttatgtggtatatcacatttatttacttgcatatgttaaaccatcccttcatttctggtataaaatgcacttgatcatggtgtattatctttttgatatgctgttgtatttggttagctaggaatttgctgataattttatcatctatgttcatcagaaatatttactttttttgtttttttgtcatgcctttttctggtttggggattagggtgatattggcttgatggaatgatttagagaagattacctttttatcttttggaatagtttcagtaagattggtaacaattcttctttgaatgtctgatgataaaatatatctgtgaattcatgtactcctggacttatttggttagcaattttttattactatttcaatctcactacctcttattggtctgttcagagtttctgtttcttccaggtttaatctaaaaggattgtgtatttccaggaatttatgcatcttctctaggttttctaatttgtacatgtaaatatattcatggtagcaaaatcttttgtatttctgtggtattgtctgtaaatcttccattttgtttgtaattgagcttatttagatcttctctctgctttttttggttaatcttgctagtaatggtctatcaattttgttcaactttgtaaacaaccagctttttgtttcatttattttcttgtatttttttgtttcaatttcagttagtttttctctttgttattttttctgtgctgctgcatttggatttgatttgtttttgcttctctagatttttgaggtgtaaccttatgtagtctgtttttgccattttagactttttgatgtaggcatttattgctatcaactttctcttagcacgacttttgctgtatcccagaggtattcataagttgtgacattattgtcattcaaatcaaagtgtttttaaatttccaccttaattttgttgttgattcaaagctcattcaggaggctgggcatggtgactcactcctataattccagcactttggtgggcagatcacttgaggtcaggagtttgagactatccttgccaaaatagtgaaaccccatctctactaaaaatacaaaaattagccaggcatggtggcttgttcctgtaatcctacctactcggaggctgaattgcttgaacctaagaggtggatgttgcagtgagccaagatcatgccactgcactccagcctgggcaatagagtgagactctgtttcaaaaaaaaaaaaaaaaaatcattcaggagtaggctatttgggtttatttctgggttctgtattctgttctactgatctatgtgcctggtttttttgtttgtttgtttgtttgtttgtttttttgagatggagtctcgctctgtctcccaggctggagtgcagtggcgcgatctcggctcactgcaagctccacctcccgggttcgcgccattgtcctgcctcagcctcctgagtagctgggactacaggcgcctgccaccgcgcccggctaattttttgtatttttagtagagacggggtttcaccgttttagccaggatggtctcaatctcatgacctcgtgatccatctgcctcggcctcccaaagtgctgggattacaggcgtgagccaccgcgcctggcctatgtgcctgtttttataccagtatcctgctgttttggggactagggccttataaaatatattatgccttgaagtcaggtaacacgatgcctccagatttgttctttttgcttagttttgctttggctatgtgagctcttttttggttccatatggattttatcagtgatttttctacttctgtgaagaacattggtggtattttgatggaaattgcattgaatttttagattgctactgatttgtgtacgttgattttgtatcctgaaactttgctgaattcatttatcagttatagaagcttttcagaggagtctttaatgttttctaggtatactattatattaccatcaaacagcaacagcttgatttccaccttaccaatttaaaactttttttttttttttttgagacggagtctccctctgtcaccaggatggagtgcagtggcacgatcttggctcactgcaacatctgcctccggggtcaagcgattctcctgcctcagcctcctaagtaactgggactacaagtgtgtgccaccacagccggctaatttttgtgtttttagtagagacagggtttcactatcttagccaggctggtctcgaactcctgggctcataatccacccgcctcggcttcccaaactgctgggattataggcatgagccaccgtgcccggcctaacaattatatctgtctcatcacttaaaagagccactaattttttttttttgagatggagtcttgctctgttgcccaggctggagtgcaatggcatgatctcagctcactgcaacctccgcctcctgggttcaagccattctcccatctcagcctcttgagtagctgggattacaggcacgcaccaccatgcctggctaatttttgtatttttagtagagatggggtttcaccatgttggccaggctggtcctgaactcctgacctcgtgattcgcccgccttggcctcccaaagtgttgggattacaggtgtgagccactgcacccagaaagagccgctaattttactttggaaatatagtgaatatttatattaaaagctaggctaagcttactattatgtagaaaatttgtgatttgcatgtgcattattacccattaagtggtctacagtttctgaaagtttcagaaacaccaatataaaaatactatttctgattgaataaaggatatcaagttattttagttactaaatgaaacagattggaattactggtcacaatgtggttttaaatgttatttaatgaaaacgtgaagtttctgttcaactcatgttaactatttctattgtttttttcacttctattagaaaaatattaaaatttaaattgctacaaatgtatgaatgtattcaaatctaaacacagtgccaatcttaaaagatctgtatgcataggattatagaacacctattctctttttacacttagaagataaataactgcttttcagtaaacccaatggggcaattgtgactcacaatcataagctactaaaatattaatactatcatctagaaagtattaattcatttttcttacttatgaaacacaatcataatttctagttgacataacactagatttgaggtgctgtggctgtagtaactagaaatgtcatggttgactcagctttaccttctgcctatttctcacaaacacagcaaaacaaggaaggccagaaatcctacaccttgattgcaaacacaccagtacccttctagggagaatatatgtttgaacatattaacttgaaattcctggcatcttttcttgaagaacagactttttttttttttttttttttgaggtggagtttttctcttgttgcccaggctggagggtaatgtcgctgtgtcggctgaccgcaacctctgcctcctaggtacaagcgattctcctgcctcagccttctgagtggctgggattacaagcacctgccaccatgtctggctaattttctttgtatttttagtagagacagggtttcatcatgttggccaggctggtctcgaattcctgacctcaggtgatccgcctgccttgaccttccaaagtgctgaaattacaggcatgagccacgatgcccagcctgaggaacagatttctatatggcaaataataaaggcaaataaaaattaacgctaaaatagaatgaggaaagtattctttcttcaccagaatggttgtgacagaatggttgcagcagggtggtcttaaataaccctcactctattttgttattcttgagttatggtcataagacatttatgcttatttgagagaaatctttttttcctaattcagaaatttagcatgattttcacaatctcacattttcaaaaatggttcattataaaaaagaaagatgattaaaccaacttccattttttccccaaagagtaacaaattaaatctgtagtctaaagtacagctaataaaaaataaagattagtcacttattctagctgcataattgggaataaaacacttcttgagctatagaccaagagctttcagagatgttagcttatagaatgtcgagcgacctggtacagagactttcacccctctttcaaaagggaacataatactgagtctttcaccccaattccaactattaagccagaacgggagaagtgtaacatgtcattatccacaaaccattttattattacagattgagggtatgtgtgcagatttgtaacacaggtatactgcatggtgttgaggtttgggcacttaataatcccattacctaagtggcatacatcatacctgttaagtagtttttcactgtttctctcccttctttcttctttttggaatccccagtgtttattgttttcatctttgtttccatatgcacccaatgtttagctcccacatgtaagtaagaacatgtaatagttttctgttaatttgcttagaataatggccatcttctgcagacatgttgctacaaaggacattacttcactgtcttctgtggctgcatagtattgcatgatgtacaagtatctaagttttttttatccaatttaagattcatggctacctagtttaattctgtctttgctactgtgaatagtgctgcaataaacacgtgagtgcaaggagtcttttgggtaaaataatttattctcaggcggggcacagtggctcacgcctgtaatcccagcactttgggaagcccaagtgggtggatcatgaggtcaagagttggagaccagcctggccaccaggatgaaaccccgtctctactaaaaatacaaaaaattagccgggcatggtgacacatgcctgtagtcccagctactcaagaggctgagggaggagaattgctggaacccagcaggcagagactgaagtgagtccagatcgcgccactgcactctagctggggagacagagcaagactccatctcaaaaataaacaaataaataaataaataatttattctccttttggtatacacccagtaatgagactgatgggtcaaacggcaattctattttcagttaagaaatctccaaactgcatttcacaagggctgcattaaactgcatttcaaccaacagtatatatacattcccttttctccacaacttcaacatctgcaatatttttactttttaataacagccattctaactgctatgaaatggcatcacattgtcattttgatttacatgtctctgatgattagggatggtgagcaattttttgcatgtttattggcaactctcatgtctttttttgagaagtgtctactcagatcatttgtgtatttccttattaaatttttatagtattctaaccattaacttaatttatatattatataaatacataatatatatgaataaatattaactttttcttgtatgaagtttgaaaatagtttattccatactctaggttgtctgcatatttgtcaatggtttcttttggtgtgcagaagttttttagtttaattaggtgttaatttttcacttttatttttgttgcattcacttttatggtgttagtcataaatcctttccagaggccagtgactagaagagtacttttttgatgttctacgatttttatagctttaagtttcacagttaagtttttaatctattttgaattacattttttatatggtgagaggtacagtttcaattttctccttctacatatgattaaccagttttcccagtaccatttgttggatagacaatttttccttgtttacttctgttgactttgtcagaaaaaagttgggtgtagaaatgtaaacttatttcagggctttctcttctttctattggtctacatgtgtatttttgtagcaagccatgtaatatggattactgtagctttgtagtacaagccaggtaatgtgaggcctccaggattgctttgttgttaatgttgctttggctaaatgggctgttttattcttccatatgacttttagaatggttttctttttctaattccataaaaagttgcatttatagtttgagagaagtagcacttaatctgtaagttgctttaggcagcacggacattttaattatattgattctttaaattcatgagcatggagtgcctttttacttatttgcgttgtctctattttttttcagcagttttgtagttcttgttgtagagatattttacctccttgatttaatgtattactaggtacatatttttttgtttgtagctattgtaaatagaaccatgttctttttttctcagcttgaatattattggtgcacagaaatgctactcatttgtgtatgttgatttagtatggtgagactttgctgaagtcattctttaggcttagaaatcttttggtgaaatctttttcggtgaagtttcccaggtagagaattatatcaccagtgaagataatttgacttcctctttttctatttgaatacattttattgctttatcttgttaaattgctgtggctacgactttcaggactatgttgaatagaagtgtttagagtggatactctttgtctttttttttttttttttttgagatggagtctcactcttgttgcccaggctggattgcaatggcatgatctcagttcactgcaacctctgcctcccacattcaagtgattctcctgcctcagcctcctgagtagctgggattacacatgcctgccagcacgacaggctaattttttgtatttttagtacagacagagtttcaccctgttggccaggctggtcttgaactcctgacctcaggtgatccacccacctcagcctcccaaagagccgggattacaggcgtgagcaactgcacccagccttatttttattctgatggagacctcatccaggttttgcccgctcagtatgatgttggctgaggatttgtcatggatggctcttattattttcaggcatatttctccagtgcttagtttgttgagaatgtttttataaatgagtattagattttcttgaatgccttttctgcatgtgataattgttttttaaaaattatctttacatggtgaatcacatttatttacttgtatatgatgaaacatctttgcattcatacaatgaagtttacatgattgtggcaaaataactttttgctttgcttatgaactcaacttgctagtacttcatgaatttttgtttcaattttcaccaagaatagtgaccggtaattttccttttttgttgtgtcttcactaggttttactaccaagataataatgttttcaaataatttaggaaggacttccaccttgatttttggaatacactcagtagaattaataccaggttatctttgtatatgtgataaaatgtggctgtgaactcatcttatccagggctttctatggttggtagcttgttttattagtaattcaatcttattatatactttatacattgttgctctgttcaagacttctgtttctttctggttcaatgctgagaagctggatgtatccaggagtttatctattttctctaaattttttagtttgcatgcatagagatgtgcatagtagtctctgaggatgtttactatttatgtgaaattagttgtgatatcacaactctaacatttaaatagatgcagaataaaagcttgacaaaatttggctgggtgcagtggctcacacctgtaatcccagcactttgggaggtcgaggcgggtgggtcacctgaggtcaggagttcgagaccagcctggccaacgtggggaaaccctgtctctactaaaaatacaaaaattaactgggcgtggtggctcacgcttgtaatcccagctactcaggaggctgaggcaggagaattgcttgaacctgggaggcagaggttgcagtgagccgagatcgtgccagtgcactccagcctggatgacaagagtgaaactccagccaaaaaaaaaaacaaaagtttgacaaaattcaacattccctcatgataatctctaaaaaataattagtataggacaaatgcatctcaagccaataaatgccatgtatagaaaaaaatgtccagctaacaacatattaaacagtgaaatgtaagctcttactctaagacctagaacaagacagggatgccctctttcttccttttcctttcttcctttccttctctccttttcttgcttctctttctttctctctcctttcttcctttccttctctccttttctttcttctttctttctctctctccttccttccttttctttctttcttgttctttcttcttttttttttttgacggagtctcactcttgtcacccagactggagtgcaatggcacaatcacagctcactgcaacctctgtctcccaggttcaagcgattcacctccctctgcctcccaagtaactgggattacatgcacctgccaccatatccagttaatttttgtatttttagttagactgggtttcaccatgttggccaagctggtctcgaactcctgacctcaggtgatccacctgccttggcttcccaaagtgctgggattacaggcatgagccaccactcctgagcagatgaccactttcttcattcttaactaaacataatactaaatgtccaaagagagaaattgtaagataaaagcaaagataggcagattggaagaaaagaaattaaattatttgtttgcagacgatataatcttaagtacagaaaagcctaagactttactagaactactagaactaataaacaaatttattaaatttgcagaatacaaatcaacatatgaaagtcagtagcatttctatacactaacaattaactatctcaaaatgaaatttaaaaagaatcccagctacaataacttgagtaactatactttgaaataaatttaagtaaaaaggtgaaacaccttatattataatctaaagaacataaaagtaaaaaattaagtaatacacaaatggaaaatattactcattcctgaattggtactattaatattgctaaatatgtgtgttaaacaaaataatctacagataaaatgtaacctgtatcaaaataccagtgacttcataaaatttttaaaatgtatttaaaattaatatggcaccacaaaagaccccaaatacccagagcaatcaagcaaaaaagaaaggttgaaggtatcacacaaccttactttgaaatatactacaaagctatagtgaccaaagcagtatattggaataaaaatgaacccaaagaaaccagaaatatatccatgtatttacaactgtctaattttaaatataggtgacaatttctcagagaaaggacagtatcttcaataaatggtgttgagaaactttacagccacatgcaaagcaatgagaccctcatttgacaccacatgtaaaaatcaattcaaaataaattagaaacttacatgtaatgcttgaaactgcaatgaaactaatacacaaaagtagagtaaaagccccataacattggtctaggcagtaactttttttttttttttttgagatagagtctcgttcttttgcacaggctggagtgcattggtgcaacctcagctcactgcaacctccatctcccgggttcaagcaattctcctgcctcagcctcccaagtagctgggactacaggtgtgtgccatcaagtctggctaatttttgtatttttagtagagacggggtttcaccatgctggccaggctgttctcaaactggcctcaagtgatccacctgcctcggcctcccaaaatgctgggattgcaggcatgaatcaccacacccggctggcagtgactttatgatttaaactcaaaccccaggaaagcaaaggaaaaatagatgactcagattacttcaaattaaaaagctgctgcacagaatctgatgaaatcaacaggatgtgacaactaagaaataagagaaaatatgtgcaaatcatacatgtgacaaagggttaatatcaaaaatatattaaaattcaaatgactatatcacaaaaaacaaattaaaaatgagtaaaatgcttatttttcaaaagacatacatagagccaacagatacataaaaaattctcaatgtcaattattattattgaaagccaagacaaaataactgtgagatatatactcacttttgatagaatgactcttagtaaaaagaaatgtgttgataaagatgtgaagaaaagggaatgcttgtatactattggtatgagtgtaaatgaggacagccattttggaaaacaaaagagagatttttcaaaaaaaatttaaaatcaaactaccatataatacagcaattgcactattaaatatacatccaaaatgaataaaatcacaatgaaggaaagtttgcacttctatgttgtttgcaacactcaacacctaataagtaaataaagacaatgtggtagatatatctagtggaatactcttcacctctaaaaaaaaattctattattttcaaccacatggattaacctagaggatattagttgaaataagccaggcacagaaagattagtatttcacgatttcacctacacttaaagtataaataacaaatctcattgaagtagagagtaaaatggtgaccacaagatgccaagatacttagaaaaaagaatggtttggaaagatgtctatcaatgaatacataattatagttaagttggaggaataagttcaagatattgtttgtgcaacactgactacagttcataatattgtatttttgaaaaatggtaagaggatattacaggctctcaccacaaaaatgtaaactatgtgaggtaaagcattaattacctagaatttatcatttgacaatgtagatatacttcaaatcatcatgctttacagaacacacatttcatctgtccagttaagaaatgtatttttaaaacattatagaaggataacaatgtttcaaatattgtgtcttcatcattaattttgctgaatagtatccaaaatatatggtttttgtgctgtttttttcgcattatttttcagccacaacacaaccataggtactctgatatttaacagcatgttctggacacagcacagtgtatgagaggagccaatgtagtttagggcttctaagcttggggcacctggagtttctggtgctgatggtaatggtatgatagacagtaaatgggcaggtgatgtttattgtcccatgactgtgaacacagtaaacaagcttgcatgcaaaataataggaaatgttttaatccacaagttgccaaaatttccaaaattcttcagagaaaatgaccaaggagttggctatacttagatgactcagaataaaaactgtagattgggccaggtgcgggggctcacgcctgttatcagcattttgggaagctgaggcaggtggatcatgaggtcagcagttcgagaccagcctgcccaatatggggaaaccctggtctctactaaaaatacaaaaattagctgggtgtggtggcgcatgcctgtaatcctagctacctggaaggctgaggcaggagaatcacttgaacctgggaggcggaggttgcagtgagccgaggttgggccactgcactccagcctgggcaacagagcaaaactctttctcaaaaacaaaaaaaaactgtagactgaacttcacccactgaaaaaaagttatatgaactggaaatttcttcaaattgtaatatcagtatggaaaagaaatattatctcaaatttcaaattcacagaggtcactttattattttgccatgtttaacattcactcttaaagtagaagattctgcatagaaattaagttacactacattacagaaaagtaaatttaaaattctttacttaccattagaactcctaaaattttgatttctaaaatatattctctagcaaattttgtatttgctacacgttgtataaaaatctaggccaggcgcagtggctcacgcctgtaatcccagcactttggaaggccgagatgggcggatcatgaggtcaggagatcgagcccctcctggctaacacggtgaaaccccgtctctactaaaaatacaaaaaattagctgggcgtgttggcgggcgcctgtagtcccagctactcaggacactgaggaaggagaatggcgtgaatgtgggaggcggagcttgcagtgagccgagatcgtgccactgcactccagcctgggggacacagcgagacactgtctcaaaaaaaaaaaaaaaaattaaacagatttcaacaagaaaaaataataaaaatttaacctacggaaacagtattttttaaacttatttgcagttgaaagccactggcaaaggagattaccagagatgttagttgattacattaccaaatagtatattcttactatcatttacctacacctttgagtaaatgggataggtttcagttagtggcataataatgcttcattgaatgcacaatagtattaacatgttaaaaatgtataatgaaacaagttcacacatcatctgaaaatttaaaaatgtactgcattttattacataaaagtacaaatagtaaaataacgtactaattttttaattttaacaaaacttaaatgttcttactataatgcaaaagaatattactctaaacacctacctcatgcaccactcaatatcataattaaccacaaataccatctccacttagattttcatcatgcatgttacattttaatgtccttactcttccaaagaaaaggtcataaataatgcccacctaaaaaaaaagaaactctcctatctttgatgccgtgacaactgatcacatgctttcacatgtgaatacaatagaaatgaagaaatagcatcaagtaactagagagttgaatcacagcaatattagctttttaaaaaatctgtacttcttttcaaggaaaaaagaacactttgggccgggcgctgtggcttaagcctgtaatcacagcactttgggaagccaagctgggcagagcatgaggtcaggagttcaagactaccctgaccaatatggtgaaaccccgtccctactaaaaatacaaaagtcagccggacgtggtggtgtgcacctgtaatctcagctactcagtaggctgaggcaggagaattgcttgaacccaggaggcagaggttgcagcgagctgagattgtgccactgcactccagcctggacgacagagagagactctgtctcaaggaaaacaaacaaacaaaaaaagtatactttgaatgtaattacaaacttccaaaaaatcttctactccttttaaagttatgtacaaataaatttatctaccgttagtttgggatcatttttaacagtcagcactttgatatagtgtaatgtctgaagcatccataccttagtttgtttgtttttgagatggagtctcactctgtcacccggctggagtgcagtggtgcaatctcggctcactacaacctctgcctcctgggttcaacggattttcctgcctcagcgtcccaagtagctgagactacaggcacgtgccgccacgcccagctaatttttgtatttttagtagagacagggttttaccatgttgaccaggatggtctcaatctgttgacctcatgatctgcccacctcagcctcccaaagtgctggcattacaggcgtgagccaccatgcccggccctaccttagatatttccactgtgaattctctgatatttacatagacttattttggattaaatgttttaaatatatactgcatctgcaaaaatatatctcagtatgaaccctctggtgttgtctaagttgtagttttggaaaacttttttttcaaatttattacatttgcagggtttttctccaatctgaattccctgatgttgaacaaagtttaagtaactgcttcagggttttctctagtacaaaatgtgtacaataagatctgtgatacaaataaaggtattacaatcctcttttatttgtaatgtttgtcttcaaaataaatactttaaaagcttatattttctgaaatactttttgacagtaattaaatttataatactttttttaagtactctctgatgttgagtaagatgtgagcagacattaatggctttttcacagtctttatattggtacaatttttctcaagtataaatgctttcctggcaataaggtgtgagtattcattaaaaattttgccacattcttcacacttgtaagagtttttctagtaagaattatcttacctacaatcaagtgtgacaatcatttaaagattttgtcacatttttcgcatttttaaagttcctcaccagtatgatttattttatgtttagaaaagtttgaggtgttgtcagaattactgtgatgtcttccagctttgtagtttctctccagtttaagtttttttatgtttagtaagatttagggaccagttaaatgctttgccacattctttacatttgtagggtttctctctagtatgaattatcttttgtttcataaggattaagagccagttaaaggctttgccacatttatcacatttgtaggatttctctccagtatgaattatcttgtgttttaataaaagttgaaaatacactaaaggatttgacacattatttacatttgtagggtttctctttggtatgaattctcttatgtttagtaaggtttggggactggttaaaggctttgccacattcttcacatttgtagggtttctctccagtatgaattatcttatgtttcataagggttgaggactggttaaaagctttgccacattctttacatttgtagggtttctctccagtatgaattatcttatgtgtagtaagatgagaggacagaataaagcttttgccacattcttcacacttatagggtttctctccagtatgaatttttttatgattagtaaaatttgaggagtagttaaaagttttgccacattcttcacatttgtagggtttgtcttcagtatgaattactttatgtttagtaaggattgagaatatactaaaggctttaccacattcttcacatttgtagggtttctttccagtatgaattaccttatgataagtaagagttgaggacttggtaaaggctttaccacattcttcacatttgtagggtttctctccagtatgaattaccttatgattagtaaggtgtgaggaccggttaaaagctttgccacattcttcacatttgtagggtttctcttcagtatgaattatcttatgtttagtaagggttgaaaatacactaaaagctttgccacattcttcacatttgtagggtttctcaccagtatgaatcctcttatgtgtagtaaggtgtgaagatagggtaaaggctttgccacattctccacatttgtagggtttctctccagtatgaattttcttgtgattagtaaggtttgaggactgtttaaaagctttgccacattcttcacatttgtagggtttctctccagtatgaactatcttatgtttagtaaggtttgaggaccggttaaaagctttgccacattcttcacatttgtagagtttctctccagtatgaattatcttatgtctagtaagagttgaggactggttaaaagcttttccacattcttcacatttgtagggtttctctccagtatgaattatcttatgattcgtaaggtttgaggactttttaaaagctttgccacattcttcacatttgtagggtttttctccagtatgaattatctcatgttgagttagttgtgaaagcatgcaaaatgatttgccacattctttacatttgaaaggattttttccagtatgtcttatcttatgtctctttgcatttgaatatttatgaaagactttcacgtatttgtcacactgaactattttgctctgggtagttgtcacacaccggttaagtcccttgtgacctcctttgtgcaacttatgctcatccacacttttacagcctttctgatatccacattttccatatcttctcagtatcacttgttggaaagaattttttatatattgctctggcctaaggtctttggcaaaatgagaacacatagctgaaagaaataaaaataacaaattattccatttactcaactcagattaatatttacaaatctaacttataccaactatataaacaagatgacatagcaaaatactacagatcctaaatcctttatagacatataaatgtaacaaaagcattctgaccaaaatacatttgtaaaaaatttataaataagtaaagtctgtgcagtgccccaggtgatgacaatgcaaagagccacataggagaaaaaagaaaagtctgttacatttacccaacacacctctttctgctgcccaatataacatagcgccttcagaagtaaattgccaactcctggtttcttttttaaaagactaaaaaaaatagtgtcacatacatctttatttctggctcttaggggccttttcagacactggtttctgtctcccatgacataaagtgctaaaagaaatggtggtatactttggaatgacagtttgagtctgctgagaccaaagttaagtgttacagcagcagagactgcagtaccacatacaggaaacaggtttagcaagtgattactgactatttagaaaaaacactaacatacttctttaacttaaaaagcccacaaaatttcagacaagacacaatctaagaaaatgtttgcgagactcccaaaatctctagccaagacaactggtttcaaactatcccaggcctaaggtacattataaagattgtgacagggccgggcacagtagctcacagctgtaatcccagcattttgggaggccaaggcgggtgaatcacctgaggttgggagttcaagaccagcctgaccaacatggagaaaccccatctctactaaaaatacaaaattagctgggcatggtggcacatgcctgtaatcccagctactcgggaggctgaggcaggagaatcgcttgaactcgggaggcagaggttgtggtgagctgatatcatgccattgcactccagcctgggcaacaagagcaaaactccatctcaaaaaaaaaagattgtgacaggtagcttgtttttaatgtttaaatctcaatcaaagattaatgtacacaaaatattagggcaggatgaccccatcaaaaacattactaaactttcagaaagcaaccataggaatataaagatgtataaatttttcaatttaaaataaattaaatactacacagtgaatgaaacaggaacacagacaactactgaagttcagaaaaatgaggataacaataaaaatattaaaaatctcaaaaaacataaattaggaagataaaaatgtcagacaagaagagaatcttgggagctgcaagataaagtaatgtatcatttataaaaatgtcttatgagataaccagtaacttttcaaaaaaaactggaaggcctgaagagaactgggtgatatagtcaaagtcctggggaaaaaaaaaaaatctgtcaagtgaaaataatgcaagtaaaaagaagtggccgggcacagtggctcgtgcctgtaatcccagcactttggaaggccgaggcgggcggatcacctgaggtcagaagttcgagaccagtctagctaacatggtgaaaccccgtttctactaaaaatataaaaaattagccgggcgtggtcacgtgcccctgtaatcccagctactcaagaggctgaggcaggagaatcggttggacctgagaggcggagattgcagtgagccaagatcatgccattgcactcaagcttgggcaacaagagcgaaactccttctcaaaataaataaataaataaataaaaaagaactgtccaactgaataaaaagaaagaccttccaaaataacctaatcctgaaaaagtatattggcacttcatatgccctacataccaaagatgctgaaaggagttcatcccactgaaaataacatgatgcaggaaaacacataatcatacaaaaatacataactttctgggaaagatatttacatacacaaaaacagaattccttagcattttaataatcatgcagaaaacattattaatttttctctaaaatttaaaagataaaagcatagaaatgattataaacatctgttaatgtaacataaaaataaataattagtggccaggcacagtggctcatgcctgtaatcccagcactttgggaggctgaggagggcggatcacctgacgtcaggagttcaggaccagcctggccaacatggtgaaaccccatctcaactaaatatataaaaattagctgggcgtggtggtgggcaactgtaatcccagctacttgggaggctgaggcaggagaatcgctttaacctgaaaggtggaggttgcagtgagccatgattgcaccattgtaatccagcctgggtgacagagcaagactgtctctcaaaaaaaatgaataaataaaaatttaaaaaatatatatgtatataattagcaacatcagtaacaaagtagagagcagatataatgagaaagaatttttgtatgcaaataaggtatatatatatatatatatatatatatttttttttttttttttttttttttttttcagatggagtctcactctgtcgcccaggctggcatgatctcagctcactgcaacctacatttcccggattcaagcaactgtggtgcaaataaggttaatttttactacattaaaattgttttattttctaaagtttttatgtaattcccaaggtaccacaaagaaaatatctgtatagatacataaaagaaaataagaaagaagtgaaagcatattaatacaaaaaccaaaggacacaaaagaagacagagggaaaatgagggacaaagatacaagaattaaacaatagaattaataaaattacattagttactctttcagaaaattatttaaatatatataaaattaacttttcaatctagagacataattttcaacgaaatgatttattaaaatctttcaaataccaagattcatttgcctttttgcaagtcagttgaaacctaatgataaaaaaagactgaaagtagcaagatgaaagtagaaattttatgtaaatattaaccaaatgagagaagaagaggtcaaaataatattacacaagctacatcttaagtcaaaaagtgtcatatttaacaacatgtactttaagtgaaaactctgaaaagagaaaaaaggacactgaacaatagtagtttcatttactgggaacaaatgactagtgtgtgtgtgtgtgtgtgtgtgtgtgtgtgtatgtgtacagacgcacatctcacatgagggtttcaaatatataaaacaaatattgacggaattgaagaaacacacagagagcaatataattatagtagaatatattaagaccccattttcttaataaaaataaaacaagatggaatattagcaagggaatagaaaacttgaaatcagtatggaacaattatttctaacagaggtatagagagctgaacatcaggatacacacccttcccaatagttcatacaacattctccttgaaaggaccatctgttaggccaaaaaaaattcttaacaaattttttaaaactgaaattttatgaattactttctgtgaccaaaatggaataagattataaaacaataatttaaaaaacggaaaaattcacaaatatatagaaattgaacaacacacttttgagtgtgctgttgttcaaaggttgaaataattaatattgtgtagatgtccatgctgctgaatgtaatctagagatttaatgtaatgtctttcaaatttcttattgcacttctgaagaaatagaaacagcaaccccaaaagtatatggaatctcaagagactatactcaacaatcttcaaaaaaaggaacaatgttagaggtatcacagttctttacttcaaaatacatgacaaagctacataataaaaacaattttgtgtgaatataaagataagaaagtagactaataaaatagaatccagcacatgaactttcacatatatggtcatataaagagtcatttgcttacccataattattgcagcactgttactgaaagccaataggtaaaagcaatgcaaatttctgttacaaaatcatttagtaaatataatttgaaatataaaaacggaatatcactcagtttgcaaacagcagaaaatattataacaactataaagataaatcttaacattatgcaaaatgaaacgagccagtcacaaaaagacagagattgtatgatatgtctaacagttacactctgaaacagaacaagaatggtgtttgaaaagtgagatgaaatgggaataattggtagttgtttaatgtatattaagatttagctttacggccaggcagtgctgtactcccagcactttagggggccgaggcgggtggatcacgaggtcaggagttcaaggccagcctggccaagatggtgaaaccccgtctctactaaaaatacaaaaattagccaggcatggtggcgggtgcctgtaatcccagctacttgggaggctaaggcagagaattgcttgaacctgggaggcagaggttgcaatgaggcgagattgcaccactgcactccagcctgggtgacagagtgagactctgtctcatacacacacacaaaaaaacagatttagctttgcaagataaaaacattttagcatatgttgcataccaatataaatataattaatatgaataaactaaatatttaaaaatcttttaggtgaggcacagtggctcatgcctgtaatcccagcacttggagaggctgagacagatgggtcacttgaaatcaggagttcaagaccagcctggccaacatggtgaaaccccatctctactaaaacaacaacaacaacaataacaacaacaaaaaattagctaggggtggtgatgcacacctgtaatcccagctactcagaaggctgagtcaaaataattccttgaacccaggaggcggaggttgcagtgagccaagatcacaccactgcactccagcacaggagacacagtgagactccatctcaaaaaaaaaaaaaaaaattgtttttttaattctaaattttgctgtgtttttgacaagtaaaagtaaacaataatacttagataaagttatcatagttttaaaaatatctttaaatccaaaaataatagagattcacaaataaattgaatgttaatattagaagaatttctaacactattcacttagacaggattaaacaactattcacaacacacctacacaacaaatacacaagttataacaaaaatacatggataggctgggtgcagtggctcatgtctgtaatccaagcactttgggaggaaggcggatcacgagatcaggagttcgagaccagcctgaccaacatggagaaaccccatctctactaaaaatacaaaattagccaggcgtcgtgccactgcactccagcctgggcaacagagcaagactccgtctcaaaaaaaaaaaaaaaatgctgggcacggtggctcacgcctgtaatcccagcactttgggaggctgaggcgggcagatcacatgaggtcaggagttggagaccagcctcaacatggagaaaccccatctctactaaaaatacaaaattagtcaggcatggtggtacatgcctgtaatcccagctactcgggaggctgaggcaagagaattgcttgaacctgggaggcggaggttgcggtgagctgagatcgcaccattgcactccagcctggacaacaagaacgaaactctgtctaaaaaaaaaaaaaaacaaaacagggataatatttacacaagcaaacagagataattatattggcagtagacatatggctgattcatatttaattttgcttgacattgtcttaaattgcattgagttaatcattgtcatatacaatttattattattatttattattattttttgagacagagtctcgctctgtctcccaggctggagtgcagtggcaccatctcggctcactgcatgctccacctcccaggttcatgctattctcctgcctcagcctcccaaatagctgagactacaggcacccaccaccaggcccaggtaattttttgtatttttagtagaaacaaggtttcactgtgttagccaggatggtctctaactcctgacctcacgatccacctgcctcggcctcccagaatgcttggattacaggcatgagccaccatgcccggcctgtcatacacaattataatacaaactcaaatatcaaaacacaatttattggtgtgaggtggcataacctaaaaaatataactcaaaaatataaaattgcaaaacaaaattaaaatatgaaatgtaaaacttattggacactatcaagtagattaatatattcatgaaagaaatcctagaaaaagaatacagagaaaaagtaatatgaggacatttcaagataaaaacaacctgagagccaggcacggtggctcacccctgtaatcccagcactttgggaggccaaggtggacatatcacttgaggtcatgagttcaagaccagcctggccaacatagtgaatcccgatctctactaaaaaaatacaaaagttagacagggtgcggtggctcatgcctgtaatcccagcacttagggaggccaaggcaggtgtttcacaaggtcaggagtttgagaccagcctggccaagatggtgaaaccccatctctactaaaaatacaaaaaaaattagccaggcatggtggcagtcccctgtaatcccagctactccggaggctgagacaggagagttgcttgaactcgggaggtggaggttgcagtgagccaagatcaagccactgcattctagcctgggcgacacagctagactccatctcaaaaataaaacaaacaaacaaacaaaaaaaaattagctgggcatggtggcacgtgcctgtaatcccagctactcaggaagctgaggcaggagaatcacttgaactcgggaggtggagattgcagttagccgagatcacatcactgcactccaacctgggcaacagagtgagactttgtctcaaaaaagaaaagaaaaacctaagaactttccaaatgttgatgtgataaaaaaatatttctaaccaataatacttgatccaaaattattttactttaaaaacaagataaaaataaagactccataataaaaggtgtgggtgttcatcactacaagcacagtcctatgaaaagtactacatggtgtccaggcactgtggttcgggcctatgaatcctacagttttagcaggccaaggcagccagatcacttgagaataggagttcaagatcagcctgagcaacatagtgagactctgcatataaacaaagagaaatattaaaatgagtccatttttttgaaaattaaaatgatgctggccagcatcataaaaccatatataaaataaagctctctattaaatgtaaatatacagacacatatagaattatttactatcataatgatggtacacaaaatccttaaactacttctatagaatatgaaatataaaatataaatctgttagtagatgcatagtataaaataatcttcaatatcaataactactgaaaaatataaaggtatagcttttgtattaaattgaagttgttacgagattaaaatatatcattttagttttggctgggtgctgtggctcacatctgtaatcccagtactttgagaggctgaggcgggtgtatcacctgaggtcagaagtttgagaccagactgcccaacatggcaaaaacccatctctactaaaaatacaaaaaattagctgggtgtggtggcaggtacctgtaagcccaggtacttgggaggctgaggcaggagaattgcttgaacctgggaggtggaggttgcagtgagccgagatcatgccattgcactccagcctgggtgacagagcaagactgtgtctcaaaaaaataaaataaaatatattattttcatattaaaatgttttatgtaatctccatttctcaagacaattacaaagataatatttatcgaaagtataaataaggaaatggaaaaataaccaaagcatatcactacatagaataaacaaaaataaaagcagcacaacaagaaatgagaaaaaaaaatctacaagaaacacataacaataacagtaaaactggtaatagcaactctattttaaagcaatcattttaaatactaattaattaaactacttaatagaaagaaacataatcctaggatgttgtgaggtcaaagtgggctgatcacttgatcccaggagtttgagatcagcctgagcaacatctcaaaaccctgtctctacaaaaaaaaatacaacaaaacttgctgggtgtgatggcaaatatttgtaacacagctatttgagaggccgaaatgagaggatcatcagagtttggaaagttgaggctgcagtgagccatgatcatgccactgaaaaccaggctgattgacagagtgaaaccctatttcaaaactgaatgaataaataggccaggcatggtggctcatgcctgtaatcccagcattttgggaggccaaggtgggtggatcacttgaggccaggaatttgacactaccctggccaacacagtgaaaccccaattctactgaaaatagaaaaaattagatgggtgtggtggcacatgcctgtaatcccagctacttgggaggctgaggcatgagaatcacttgaatccaggaggtggaggttgcagtgaggcaagatcacgctacagcactccagcctgggcaatggagtgagatcctttctcaaaaagaaaaaaaattaaaataaatgaataaataaataaaattataaaaaagaaaaagaaataaaacatctgagtaactggaaaaaagcatacaatatgctgcctacaagagactggttttagcattgcattgaatagactgaaagtaacgtaatagaaaaaatttatttttcatgcatatagtaaccacaattgggtaaggtagttataattatattagacataatatgcttttagtcaagtactagcatgagaacaaaattgatattatataataataaaataggtcaatttaccaggaatctataactattatatctctctctatatatgtatgtatgtataaaacataagagctgcaaaatatataaagcaaatactgacaaaagtgaagaaatacttagcaacataataactgtaaacatcaacaccccatttgccataataaataagaaaataaaaaactcagacattatagactgtattaattattttacctacagaggaatacctgagagtagataatttataaagaaaaaaggtttatttggctcacagttcagcagactgtacaggaagtgtgtgccagcatctgtttctggtgagtaagggtcctagtaagcttataatcattgtggaaggcaaagtataagtggacacatcacacagtaagagacagagtaagtgtgaggtgaagaagccaggttttttttttttttttaaccaaccagctctcatttgaatcaatagagcgtaacctttttgattatcaaaaggatggtgccaaaccatttatgaggaatttgctcccccatgacccaaacaccacccaccaggtcccacatcaaacaggaggattatattgcagcatgaggtttagagaaaatggacatcctctaaccttaggccaaccatatcatatcaccaactaggcttaacagatatgtacaaaacttaccaggcaaaagcaagagaatacacacaatattcttacttgctcctagtgtgttctgttacgacacataccaagtcttattaaatttatgaatactggctgagtgcagaggctcatatctataatctcaacactttgggaaaatcacatggggcaaaaagtttgggaccagcttacacaacatagtgagaccctgtcgctactaataaatcaaaaaattaaccaggggtagtagtgcatttctgtagtcccagctcaaaaatttgaggtaaaaggatcacttgagcccagcaggctgaggttgcagcgagccaaaatcatgtcactgcactacagcctgggcaacagagtaatatcctgtctcaaaataacaacaaatacatttaagaagaccaaaagtatacactatgttttctgaccaaaactgaaagaaactaggcattaaaagccaaagtaaaactgggaaatccaaaaatataggaaattaaaacacactcttcaacagattcttttttttttttgagatggagtctcgctctgttgccaggctggagtgcaatagtgtgatctcggctcactacaaactctgcctccagggttcaagcaattctcctgtctcagcctcctgagtagctaggactacaggtgcgtgccaccacgcccagctaatttttgtatttttagtagagacagggttccaccaggttggccgggatggtctcgatctcttgaccttgtgattcgctcacctcagcctcccaaagtgctgggattacaggcgtgagacactgcacccagccacttttcaacatattcttgctccagggtcaaaaaatttaatttttcaaagacattactatgacctaacagtggtgaatgaatttaatataatctctataaaaaccctaatcacacagttttttacagaaatatagtttatttttttatttttattttttttagatggagtctcactctattgccaggctggagtgcagtggctgtagtggcctgatctcggctcactgcaacctctgcttcctggattcaagtgattctcctgcctcagcctcctgagtagctgggaatacaggcacccgccaccacgcccagctaattttcgtatttttttttagtagagacgggatttcaccatgttctccaggatggtctctaactcctgacctcatgatctgcccgcctgggcctcccaaagtgctgggattacaagcgtgagccaccgggcctggcctaaaatttttaaatttgattacaaactatagataaacacccttgaaaaagaacaaagaggcattatactttctgatttcaaaacatattaaaagctacaacaacaaaacaatgtggtactgacacaaagataaacagatgaaagaacagagagcccagaaatgaactcttctgtataagataaaataaccttccacaaagttgccatgagcatacaataaagaaaagatattctcttcaaaaaatattgttgaaaactggaaagcgacactgatgaaataaagttggatcatttccttgaacaaaatacaaaaaatatggtttaactaaatacttaaacatgaaaagataaataacatctcttagaaaaaacataggaaaaagtcatgtcattggtcttggcactatttttttagatatgacactaaatgcatgagcaacaacaacaacaacaataaccattaagatttaactgcattatacttcaaaatttctgcacatcaaaacaaaaattcaatagacaatgcctcctagaaaatgggtgaaaatatttgcaaatcacaagagatgagtgatgagttaatattcagaatatataaacaactcttaaaactgaacaataaagctgaataacttgatttattaatgaaaaaataattgaactgaattttcatttaaaaagatacccaaatgggaaaaagtatttgaaaagaaaagcaaaattaataatttatagagaaacacataaaaaagaaaaatgaaatcacctcacacccattacaatggctactgtaaatttatgaaaaacaccaaatctgttgataatgcaatgaaaataaaacccctgttgattgttggtagaaaacaaaagagcagctattgttttaaaatgttacaaatattggccgggcatggaggctcaggcctgtaatcctagcactttgcgagaccgaggcaggcagatcacaaggtcgagaattcgagaccagcttgaccaacatggtgaaaccccatctctactaaaaatacaaaaattagccgggtgtggtggtgcacacctgtaatcccagttactcggaaggctgaggcaggagaaatcgcttgaacccgggaggcggaggtttcagttagctgagatcaggccactgcactccagtctgggcaataacagcaaaactccatctcaaaagaaaaataacataacataacataacataacataacataacataacataacataacataacataaaacataacataacataacatacataaaataaaataaaataaaatataaaataaaatataaaataaaataaaatataaaatacaaaataaaataaaataaaataaaatataaaataaaaaataaaataaaataaaataaaatataatataaaataaaataaaataaaatacaataaaatacaataggaattacaactatccaagccccttgtaaccagccaactaaaggtggaccccagcacagaaactgcaggcttgagaccaagctactacccctctccacaaacccagagggcatcccagaaccctggcagcccaaaaaagaagatcttgtctgggcgaagtggctcatgcctgtaatcccagcactttgggaagctgaggcgggtggatcacaaggtcaggagttcaagaccagccttaccaacatggtgaaaccccgtctactaaaaatacaaaaattagctgggcatggtggcacaagcctgtaatcccagctactcgggaggctgaagcaccagaatcacttgaacccgggaggcggaggttgcagtgagccgagatcacatgactgcactacagcctgggtgacagagtgagactcagtttcggaaaaaaaaaaaaatctttaccttctgaaatcagtttatcagtttataaaaagttgaagaggcatttgcattttcaaatttacagacaccaatgccaaactatattgtgcccacttgtcaatgcttctcttttaacataacactgaaaatatgtggcagaagaattagtcaaaaaataaaaaacccattgaaattgaagacaagtaaaatgtttgtttgtagatcataaaatcttacatataaaaatacataaacagtacattaaaacctatctaataaatacactcagtaaattaccaaatataaactcaacttataagttatcattctataaacctaaattgtctaataaaataaaggaagaaagcaatattatttataatagcattaaaataatatatttctgagaacaaattcacccaagaaagtgaaaaaaatctttacaataaaagatataagatttcaatgatgaaatcagagaagacacaagttttaaaatatttaatatctatggatttaaagaataaatattgttaaaataccatattatccaaagtgagctatagattcaagaaactccctaccaaaattctagtggcatttttttcatagtaatagaaaatacaatccctaaatttacatgaaactataataaatcttttttttttttttttgagattgagtttcactcttattgccaaggctggagtgcagtggcacaatcgcagctcacagcaacctctgcctcccgggttcaagcaattctcctgcctcagcctccagagtagctgggattacaggcatgcaccaccacacctggctaattttgtatttttagtggacacggtatttcaccatgttgttcaggctggtcttgaactcctgacctcaggtgatccacccatctcggcctcccacagtgctgggtttacaggagtgagccaccgtgcccagcccagtaaatctttttaagagacagggtctccttatgttgcccaggttggtatccaactcctaggcttaagggatccttctgccttggcctcccaaagtgataggattacagctgtgagccactgcccccccagccaaaactacaagaaactgaatagtcaaagcaatcatgaggaataagaacaaagtgaacatcatacttttaaatttcaaactatatttcaagcctgtagtaatacaaataagatgaaatgtgcagaaaaataaaaaaaacaatggaacagaaaccacaactcttacacatttcagacatgatgcaaaaagagaacttacaaaatagtttaacacagagtttctcaaaattatgcagatatttctgagtctccaaaaacaatggaaaaaaaaagtcagattgtgcaatctcttatatgccatgaagaggactttagctcactgtaaacttgaaggaagatcgctgaagggaaagtagaatttttaaagaatttaaaagcataagacagaagacgcccctatattaaagttaaaaaaacaaaacagctgcctagaaactttggaacacagatttccaagtcaaattttaaggactggttttctcttttacctttggacctcacatctgtgtcatctgttgtgttcactctcacctacctgggggtttggctgccatctcgtgtctcttcatattccagggctcttttccttgctccagacaggtgatcaggtctaaattagacacagcaatacctgttttattaaaaataaataacgtgaatcttgctcatattctccaattaccaacctagtaattttctcagtaaagagaatgtaggccaggcacagtggctcatcctggtaatcccagcactctgagaggccgaggtgggtagatcacctgaggtcaggagttcaagaccagatgggtcaacatggcaaaaccttgtctctactgaaaatacagaaattagctggatatggtggtgcacacctgtagtcctagctactcgggaggctgaggcaggagaatcactagaacccaggaggcaaaggttgcagtgagctaagattgcaccactgcatccagcctgagtgacagagcaagactccgtctcagaaaaaaatattttaaaaagagaatgtaatagaatattctagtatattaatcacaaaatatattctagtaaattaatcacaaaatactaacttataacaaaatttctaaatattaagaaaatattttcaatttgtatgttcttaattttactactcagtgctactgaatcaaaaattggtggtggcaattagattttaaggtgtgggcaacagtattttatgccactaaatttctggaattaccactaatctagagtgaaggatacagatcagctcagaaacgtggaaagttcaggtcagggtgaaacatctacacagataaatcctacattttcttaaaaacaggtagttgaaactcatttatgtaagcataaattgccaaaaaaacacgcaacaaaaaagagaaataaaacctttagagtatattaggaattgtatattaaagttatcctcaccttgccgggcaaggtggctcacgcctgtaatcccagcactttgggaggctgaggcgggcagaccctgaggtcaggagttcgagatcagcctgaccaacatggtaagaccccatctctactaaaaatacaaaaattagccgggcatggtggcacatgcctgtaatctcagctacgcaggaggctgaggcaggagaatctcttgaaccctggaggcaaaggttgcaatgagccaagattgcgccactgcactccagcctgggtgacagagtgaaactctgtctcaaaaaaaaaaataataataaataataaaaattaaaaaaaaaaaaacttatcctcacccaggaataccaggtttctataattctctaacatgacattcctatataaattctgctgtgctgtgtccaggcactgccactcctccagagagaattctatggccacatccataaatgtcaatggtccctgaaaaacacatacacacacacatatttaccaagtggttatggacagaatttttaatttgactcaaggtgaaatgagagagtaaagagaactggttctgacttataggagtgactgaaattatccaataaaataattttcaacacagaaatattctcgaatgtattctctaactctgaaaaaagagagtagtataagatccacaaaatcagtgtatatatgttacttttctgaatgataaagtataaacttaagggcatgaacagaaacatgtacattttttattgctatatatacatcatacagaatgacttgtgtatatttttcagatggaaaagacatgttgagttagaaagtgcttctcaaattttagtctgtaaaataaactggagatcttgttagtggagattattttttcagaagatctggaataaagtctcagtttttaaatttctaacaagctcaccaataattccaatgtttttggcccaaaaagaatattttgtcaaacatcccgtaagtaaaagggcctgtgtttttttcagttttacttacctgtacagaaagataagagctttcattttccaaagacatatgtatacaaggaaaacctaagaaaaagtcagctcccagataaaatatgatgatttatgcacattagctgcataaagatacttaataatgaacagaaaaataattaactctatggtgaaaaaatctttcagagagctctttaaccaaaagacttattttgtctttttttttttaaccgaaagaattattaacatcaactgcactaggacaaatttttatgatgtgctaatgcataacacagaaggacacagcaccactgctggaatattccccccaaaagtgaattatagtctgaatttaaccataaagaaaacatcagttctgtgcaaagttcaagataaacatatctttcccgttttaatttttaataatgattttaggtagacatcttgagaatatgcctttaaaggtgtcagcaccacctgtttacctgataccaccacatccacaagcaaaaagatgaagacttgcagaaaaagtccacccatttctgtccttaataacagaagagatgcgggaaaaacacgctgcaccatggaaataaagatataagtttcatttttcctgtcctcaggtgcccttcccttacatggacaccaacaatttctgctacagtaataaaaatatggaccacactgtcctctccctaccaaacccaaacagaaacagccctatggccacccttttagtgcaaaggtgagacttaactcttatgaatgtatctgaacccctcatactcaattctagcctcatgttaaaatcacatgaggcacttaattaaaacaacatggggccaggtgcggtggctcaagcctgtaatcccagcactttggggggccaaggggggtggatcttctgaggtcagaagttcgaaaccagcctggccaacatggtgaaaccctgtctctactaaaaacacaaaaattagctgggcgtggtggaacgcgcctgtagtcccagctactcgagagggtgaggcaggacaatcgcttgaatgtgggaggcagaggttgcagtgagctgagatcgcgccactgcactccagcctggtgacagagcgacactccatctcaaaaaaaaaaaatacaaaaattagtcaggcacggtagcatgcacgtgtaatcccagctacttgggaggctgactcaaggagaatcacttgaacctggcaggcagaggttgcagtgaaccaagatcaagccactacactccagcctgggagacagagtgagactccatctcaaaacaaacaaatacaacatggatgtgtccacctggagcaataaacagagcctgtgaggaggggtgaagtacagagatttctgcaaactggctgtgtaatcctaatgagaagcctgggctgataaccacttagccaagcattgcctctcaagctttagtgagcttaaaattcacttggtaattttggacccactctacgtaatgggattctgcaggtttggaaaggatccatggataaatgttttaaacaagacccctgtcaatgttaatgttgctcccccgggctcattattagcagtagttagagaaagcaggcacagcacagagtcccttacactcagcactcttgtcacaacacaagtatttctggtacaaataaagacaacccatcttcatcctaaagtttcatattatttgctggctcttcaaagtttacaaaggaaacagaaggcagcaatgtctgaataagtctgcatttggaaaacaacatgtactaatgcaaggtgtattaagcaggcgctatgtgctctcaagggtatgctacaggctgagtgcagtggctcatgcctgtaatcctaggaggcaggtggatcacttgagatcaggagttcaaggtcaacctggacaacatggtgaaacctcatctctactaaaaatacaaaaaaaaaaaaaaaattagccaggtgtggtggcatgtgcctgtaatcccagctactcaggaggctgaagtgggagaatcgcttgaacccaggaagaagaagttgtagtgagctgagattgtgtcactgcactctggcctgggtgacagagcaagaccctgtctcaaaaaaaaaaaaaaaaaagtatgttacagagcactgtgctgggaataacatattatatgatttaactctcataacatcatgcaagttggtactaagtgtttaataattaccaggatttagataaagagcccagcatttttaactcttctactgtttctctgtcattggttttttaaaaaatgtgtagaaaagccaggcgcggtggttcatgcttgtaatcccagcactttgggaggcccaggcgggcagatcatgaggtcaggagtttgagaccagcctagccaacatggtgaagccccgtctctactaaaaatacaaaaattagctagtcatggtggtgggtgcctgtaatcccagatactcaggaggttgaggcaggagaattgtttgaacccgggaggtggaggttgcagtgagccaagatcatgccattgcactccagcctgggcaacagtgcgagactatgtctcaaaaaaaaaaaaaaaaaagtgtgtagaataaaagcctaatacagacagatgagaggattacagaaagagtttaatgtagttttgaggaatttttactgggtttatatttacttttttgtgacttgtggaacaactactgaatctgcaggaatagaaaacaagttcctaaatggaatgtttctgcaaccttggttttaataaaaaattaagaaattaagaccctaaaatacatattttacttttcccatttatctgcttttgggtttcaggaaattgggagcaccagctctagagaggcagcagaattcaacaaccaaaactctgatctcttctgatcagttctgtgaggcaagactccagggctgggtgagatctaaacaaggccctcaagaagggtgaatctgaacagaactggggaaggggagaccctctgtagaattctgttctctatgccactggggtatttcaagttctgttttttgtaagcttacctaagagaaacttaaatcccagcgtttgcgtaattttaatcttttctagccactgccctgtcaattttataacatatactaataagcaatttaaacaaatctcttaaggttttctagggtaatattattagaagataaatatgtattattagcaagataaaagaaatcaaaaaataataatgcttctgtccataaatatcccttcaagtgatgacatcagaagccacaacaatataaataaagtggcccaaataaagctcacaattttttcacacatctatttgctataccaaccatatgatacttaattcaaccatttattcagttgctagtctagactaagagtttctggattgtagaaaccatgactgcttcatctatttttctaatggccatataaaattatagcaatcagtttatctgcttgagtctccagatctcctccttgtttttacccaagtaccagaaaactggagaaattcatctgggtaccaatcaaaaacatcccttgtataagggaaggaacaaacacaggatgactcatttctcttacactgagggaaaagcagaattaaccactcttgtcagcctgacacaattctgctctggacatcctcaaatgtctcaaaaatgcctacgtaattgtgagagggttcccagtgaccctgggctgatggtccaataataagccaggctagagagagtcatgctgattctaaatagaaaatggaactgccctggttgagctccagaattacttgttctgattaactagcttttggatagaaggaaggacaagaatattgtacataacattttacaggcaggtatagttgtggtcatggctccggatactttgtggtcttgatctctcactcctaagatgtttatttatatttacagaatttgccatcagattctgtttacatctggagcctctcacgtaactgtggcagacctgctacaagatcttactggacaaaatctgaaaagctcaaagagccacagtctcaaagggagctgtaggatgtctatgttgacatctcacagtgcagaaaatgccttctattggttttcagtacattcccaattcaaagtctggccctgtcttgtaatcccaggcagaagccagatcttatgtgcagattctaagtgggatcaacctgactctgcatccttaggtgttacagaaagcaaagtacaatcaaaggagagatcccctcagaggccgctctggcacgttccaaatgatgtttacctaaaaggaaatagctgaggaaacatgaatgtaagtatacaatttatttgggccaaacttgaggattgtaacctgggagcaaatattcaagttgcctggaatatatactttgattagcagcagttacaattggattggaaagacaaaaagagaggcgcatagagtgggttgatacaaagttgtctgtcaacatttttttatttacaaaaataaattgattattgattggatatacattgttaggctatagggtgtgggttatagtgtccagtgtggcatttttagttcaatttatagctacttgtggcaatagcaagcagtttcaagtggtaactacatagctcaaagaaaaaagaaagacataattgtggtctcattttaatgtctctctgagacttataaagaaaaggattattagccaggcatggtggtgcaggcctgtaatcccagctactgagaggccaagacaggagaatcacctgaacctgggaggcggagattgcagtgagccgagttcgtgccattgcactccagcctggacaacaagagtgaaacctgtctcaaaaaaaaaaaaaccttttatataggaaatgcaaatccttttcttttcttttcttttcttttttctttttttttttttttttgagacagggtttcgctcttgttgcccctgctggagtgcagtggcgcaatctcagctcaccgcaacttcctcctcccggattctcctgcctcagcctcccgagtagctgggattacaggcatgcgccaccacgcctggctaattttttgtatttttagtagagacagggtttctccatgctagtaaggctggtctcgaactcccgacctcaggtgatccacccgtcttggcctcccaaagtgctgggattacaggagtaagccagtgggcccggcaaagttttcattttttccaagcctcaagatctagattcagaaattggagctgcagattcagattctggatgggtggagtagcagcaggtattacttgcacatttgtggacattttagcaagaggagaaaaaaggaattaaaaattctcatgtctacatatctattcaatgcacacatgttattctgctagggtttttgggccccatggtctctgagtcagcttcaggtctgatgacaggagtccctgaggctgggcacggtggctcacgcctgtaatcccaacactttgggaggctgagatgggtggatcatgaggtcaggagtttgagaccagcctggccaatatggtgaaatcccatctctctttttttttttttttgaaacgaagtttcgctcttgttgcccaggctggagtgcaatagcacaatcttggctcactgcaacctctgcctcccaggttcaagtgattctcctgcctcagcctccccagtagctggcattacaggcgtgtgccaccaccctcagctaatttttgtatttttagtagagacggggtttctccatgttggtcaggctggtctcgaactcctaacctcaggtgatctgcctgcctgggcctcccgaagtgctgggattacaggtgtgagccaccgtgctcagcctttggtgaaaccccatctctactacaaatacaaaaaaaaaaaaattagccaggcatggtggtgagcatctgtaatcccagctacttgggaggctgaagcaggaaaatcacttgaacacaggagactgaggttgcagtgagctaagatcatgccactgcactccagcctgggcaatgcagtgagactccatctcaacaacaacaaaaaagtcactgaaagaggtaaaatggttgattgctgccctgtaaggtttgtagaaatctgatctagcctctctggaagtgactgtagaggacaatagataccaaataggcagagatgcaattcttcctgcatatttagggaagagcgtgcactttgcagcacaattgtgagttgactggaatcctgagagggaaaggcccttctagagtaaagcttggttgacaccttatatatttatatcacgtctggtaattctagactgtgtttggaaaatataacaagagaaattatctccagccccagaaaaacttcacaatgatggaaaagaaagaaaacttttattacacaattaaaccagaatgtgacatgcatcacaatcaatctgcttaagagactgcaaagacagaaagatagtcaccataattagtccacaagtcgaagaatttacagcaccatgtcatacagagctcatcctaaattcacctggtcattggggatgccacctatctatgctaattggttataatcaatgacaaaataaacttttcacatcttcatgacaggaggtagttttgcaacttgacaccaggtgcctgctgaaggtagactctcagtctcctactacaatggttgaatagggtgctatctttttggttatttacactttaaagcaatggctctctatgttctgagcactcagctacagcactcctgcttgccgtctacttatggctagtgtcctctcttgacccctaccatctgccaatgaggcacagcccaaagcacagagctcacagctggcagcttacatcttaagtgagccccaattgccacagcagcactccagtacctcatcagagactgaagactatggtacaggagagcctacaggatttgggggtagaattgcaccttcataataatgggaatgggagtggtgtttcagcctcagtttcaatttattatggtgacttgaaaaaaatactgctggatttccagcatgagtccagatagagataggatggttctccctgtgaaaacccacctctttgtcaacaccaagggatagcattagggcttctaaaacagacatctgaagcattgaagagaaaaacagctcttggtctgattctactgcaaaaattatattgagagaaaaaagaagttaaatgtatcttgagaaaaaactcagattagatatgattgatcaagtcagtcagaaaatattcccctaaaaggaatttctcttaaaatacccctaatgcacagctactcttggcatgagaaacatgagcattatgaagaaaaaaagcatattctcagcagaattttataaggtttctcttccatctctgctgctctcatctcctagccattgaatgggggttccatattgaaatacaactgacaattcaccagcactttttaaattacgaactggaatctgactttgttcatatagtagaatatatgtgagcttgccgcataactaactgaagggctattatggtttttgggtgaccacatcacctgtctatttgtcctggaatggcagcattccaatttagtaaaatgaaagacactaaaattatgcttacctataactatccctattggataaaacaatatgtatgtcagacacatatctactgtaacaatttggtagtattttttgatattagctatataaataaatataaataattttaatgtactagtcataatgtatgtaggatttttaaacattgtctataaccataattcagtttaaacattttatatttcagaagtataaataacaatattaaaatgactgcttaggagattcaaagtaaatattttgatcttatattcatactattgtagaaaatactttttaatttatatgaatgtatgttgtctaaaaacacttcagataactatgctaattgttcttaataaatagaaaccaaagtacaactacaggctccacttttcagtttatacactgaactgttcttgtttttgcagtgtaagtacttcagcctgcaaatattagataattactttggataattagtgttctgtaaaaggaacctagtatgttttagtccttattattctgtattgctaaatttactcctatcattgtgttcaatttgtgtgtgctcctaatatgagttttttttttttaattttttgagatggagttttgctcttgttgcccaggctggagaggaatggtgtgatcttgtctcactgcaacctctgccttctgggtttgagggattctgtatcaacctccggagtagctgggattacaggtatgagccaccacgcccagctaattttgtatttttagtagagaaagccacgcgtggctgaacagatgcttttccaaacaagacatacatgtggctaacaagcatattttaaaaatgctcatcactaattattagaaaaatgtaaaaaaacacccaatgagataccatctcacaccagtcagaatggctactgttaaaaagtcagcaatagatgctggcaaagttgcagaggaaaggaaatgcttatacactgctggtgggagtgtaaattagttcaaccactgtaaaaagcagtgtggcggccagacttagtggctcaagcctgtaatccaagcactttgggaggcctaggcaggcagatgacctgaggtcaggagttcaagaccaacctggccaacatggtgaaaccccatctctactaaaaatacaaaaattagccaggtgtggtagcgggcacctgtaatcctagctattcaggaggctgaggcaggagaatcgcttgaacctggaaggcagaggttgaagtaggccaagatcatgccactgcactccagcctgggtgacagagcaagactcagtcaaaaaaaagcagtgtaacaattcctcacagaactacagaactaaaagcagaattaccatttgacccagcaacctcataacttggtatatacccaaagaaatataaattagtctcttaaaaagacacacacatgcacatgcatatttattgcagtactattcacaatagcaaagacatggaatcaatctaaatgcctatcaataatagactgaataaagaacatatggtatggtcggacaaggtggctaacacctgtaatcccagcactttgggaggctgaggcaagttgattgcctgagctcagaagtttgagaccagcctgggcaacatggcaaaaccccgtctctacaaaaaaatacaaaaagaaacattagacaggcatggtggtgcatgcctgcagtcccagctaattgggaagctgaggtaggaggactgctcaagcccaggagattgaggctgcaatgagcagtcatcgcaccactgcactccagcctgagtgacagaatgagaccctgtctccaaagaaaaataaaataaaagatctaataaaaacaaaatatggcacataaacatcatgaaatactctctggccattaaaaaaaaaaaaaaaaaaagaacagcattatatcctgtgcagcaacatggatagagctggagaccattattgttagaaaagtaatgcagaaggctgggcgcggtggctcacgcctgtaatcccagcactttgggaggccgaggcgggtggatcacgaggtcaggagatcgagaccatcccagctaatgtggtgaaaccccgtctctactaaaaatacaaaaaattagctgggcgtggtggcgggcgcctgtagtaccagctactgtggaggctgaggcaggagaatggtgtgaatccgggaggcggagcttgcagtgagcagagatcgtgccactgcactccagcctgggagacagtgagactcatcttaaaaaaaagaaaagaaaagaaaagaaaagaaaagtaatgcagaaacagaaaaccaaatgcatgttctcatttataagtaagagttaaataataagaacacatggacacaaagtggggaacaacagtaactgaggcctacttgagggtggaaggtggaaaaacaaagagggtgtgggcattgtggctcacgcctgtatgccaccacattgggagaccaaggcagatgaatcacttgaggtcaggagttcgagaccagtctggccaacatggtgaaaccccatctcaactaaaaatacagaaattagcctggcatggtgatacacagctctaatcccagccactcaggaggcaggagaatcgcttgaacctgggaggcggaagttgcagtgagccaagatcatgccactgcattccagccagggtgacagagcaaggcttgaaagaaaaaaagggaagagaagggaagggaagggaagggagaggatggggaggggaggggagggggaaggagggagggaggtgagagagagagagaaaagaaaaaagaaggaaacaaagaaagaaagaaaggaaggaaggaaggaagaaagaaagggaaaaggaaaagagagagaaaattagaaaaaaatacctatttggtgctatgcttagtacttcagtgaaaaaataatttacacaccaaacattcatgacacgattttacctatattacaaacctgcacatgtaccaatgaatcaaaaatagaagttaaaaggaaaaaactccatggataagggagagtgcaatatagatggaaggactggtttgtgcctgggtggggctgtactctaatttatttctctgttcatacaggcaggtgagattatgaacaggtggtccagaaccctaggttggtggagaaaacaggttgctggtgcagattcagtgtctgggggtgcggatatgccaggagacttgtagacatgtttgtgagtttgtagcaagaaacaccaggatcaaaaatgctgtggtaaaattcctgagggtggtgcctagtcctgggaataagtgtggacacgtcaatgtctaatgggtatgtttgtgagtggctgggaatcctgtggtggcagctgtgggaaaagggggtctgtcatcagagctcatattctttttttttctttctttccttttttttttcttttgagacagagtctagttctgtcacccaggctggagtgcagtggcgcaatcttggctcattgcaacctctgcctcccgggttcaagtgattctccttcctcagcctcctgaatagctgagattacaagaacgcaccaccatgcccagcttattttttctatctgtagtagggacggggttttgccacgttgcccaggctggtcttgaactcctgagctcaggcaatccacccgcctcggcctcccaaagtgctaggattacaggcgtgagccacggcacccggccagagctcctattctctaatttttcagtcctctctcaccctgggagaactgaaatcacaggacaatgggcagtgtgacagcctgtgtacaggagagcagagcgtcccattcccagacatccagagttttattccaggtcaggcccccgtatcttttttctggcaccaaatctgcagtttactgaaaaccaagcaattctctaacactaactcattgtctaacattttatttctgacaccacccagtgtcagcacaggccctgactcagtcccacactgtccttacggcagatgccaggcacaaactccatgggcccatttacatttctgagctactgtttaaaaattgaggactcccataacctttttcaagttcaataatttgataaagctactcatagaactcagcaaatactgtagttatatttaccagtttattataaaagatacaacccaggaaaagtcaaatggcagacatgtatagaacaaagaaaggtggggaaagatgacacacatagacaatccagataaataactgtgattaataaaattcttcattgtttgtgttctccaggaacagtttatcgaaagaaacacccttcccattatgacttagatggtgctctcttttcttatctatcacatagcagacaccgactctgcacattttttttcttattgaaaaatcagttgaatttgacttcagtggtgaaaataaaatacttcttaaggaaactttacttaagtttgtctttttccccaaggcttctgaactttacaaacccattttatgtaactccaaagaacaggctgacttcagtgtgaaacattctctgatctaaaatctgattttttcaccctgcatttgccattccccttccacctcctttctaatcttgtttgttcctccttaggaaaggaagcctttgtctgcctgaactttgcaattcttaaagaccttgtagttggtacttctgttgcaatatttctttggaagtcaaaatttttatgtaaattcaaccttgttttattttcaaagtctataaactgcctcaaaacaagaacaacttcatcttcagtaagaccctcccaatcccctttcattttaacatcaactgcatccacctgtgggtccccagctttccagggctctgtagcttctcccaggataaagacttctatggctggggtgagcaggctgggatatctacagaggagactccccagaaaaaactaactgggcctttaataaaatttttttgcaggctcaatattagccttagctctgagccagtgggctaaagctttaatttccatgtcaagagttattcacttggtctttgaaacttaagtgtttagccgggcgcagtggctcacgcctgtaatcccaacactttgggaggctgaggcgggtggatcacaaggtcaggagatcaagaccatcctggctaacatggtgaaacgttgtctctactaaaaatacaaaaaaaaaaattagtcgggcgtggtggcgggcacttgtagtccctgctactgggtaggctgaggcaggagaatggtgtgaacccgggaggtggaccttgcagtgagctgagatcgcgccactgcactccagcctggctacagagcaagactccgtctcaaaaaaaaataaacttaagtgtttaaaaaatccagcgtttcttggctgggcgcagtggcttacgcctgtaatcccagcactttgggaggccgaggcgggcagatcacctgaggtcaggagtttgagaccagcctgaccaacatgcagaaaccccgtctctactaaaaatacaaaattaaccaggtgtggtggtgcatgcctgtaatcccagctactcaagagactgaggcaggagaatagtttgaacccaggaggcggaagctgcagtaagccgagatcatgacattgcactccagcctgggcaataagagagaaattccatttcaaaaaataaaaaaaaaatccagcagtttctcaaacacagtgttgacataagagaagaaaattttagggtgcttatatttcatatctcaataagaaaagcaaaagtgtccattcctttcaaacaataaatgcattattttattatttccattaaaagtcatatagtaaacaattagtcatatggaaacatgtctaggaggtaccaagtttcaaataaaatttagcttaaaactaggaaatcaagataacaggatttgaacagagatattcactgtcacaaatttaccctgcaaaaagaggagctgatgctttcatgaatctatgtaactcagcaattatctaccacattttcttgtgaaaatgtactcattttctacagccaaaatgggaaagacatttcccctattctttttcttggtagcattcttaaacagccttgaaattttattggaaattaccaagccataaaaaatacacctgacactgatgaaagaaatcatagatggcacaaacaaatggaaacaaatcccacgctcatggataagtagaatcaatattgtgaaaatgaccatactgccaaaagcaatctacaaattcagtgcaatccttatcaaaataccaccataattcttcacagaattaaaaaaaattctaaaattcatgtggaacaaaaaagagcctgcgtagccaaaacaaggctaagcaaaaagaacaaatctggaggcataacattacctgatttcaaactacactataaggccatagtcaccaaaacagcatgttactggtttaaaaataggcacatagaccaatggaacagaatagagaacccagaaataaacccaaatacttacagccaactgatcttcagcaaagcaaacaaaaacataaagtggggaaaggacacccttttctacaaatggtactgggataattggctagccatatgtaggagaatgaaactggatcctcatctctcatcttatacaaaaatcaactcaagatggattaaggacttaaacctaagatcggaaactataaaaattataaaacataacattggaaaaacccttctagacattagattaggcaaggatttcatgaccaagaactcaaaagcaaatgcaataaaaacaaagataaatatcagggacctaattaaattaaatagtttttacacggcaaaaagaacagtcagcagagtaaacagacaacacatagagtgagaaaaaatcttcacaatctatacgtctgacaaaggactaatatctagagtctacaacaaacccaaacaaatcagtacaaaacaaacaatcccatcaaaaagtggactaaggatatgaataaacaattctcaaaagaaggtatacaaatggccaacaaacatatgaaaaaatcctcaacatcactaatgatcagggaaatgcaaatcaaaaccacaatgcgataccaccttactcctgcaagaatggccatgatcaaaaaatcaagaaacagtagatgttggcatggacgtggtgaacagggaacacttctacattgctggtgggaatgtaaactagaaaagccactatggaaaacactgtggagattccttaaagaactaaaagtaggattaccatttgatccagcaatcccacaattgggtatctacccagaggaaaagaagtcattattcgaaaaatatacttgcacacgcatgttcatagtggcacatttcacaatagcaaaatcatggaaccaacccaaatcctcatcaatcaatgaatggataaagaaactgtggtatatatatacaatggaatactacacagccataaaaaatgaattaacagcatttgcagtaacctggatgagactagagactattattctaagcaaagtatctcaggagttgaaaaccaaacatggtatgttctgttatgtgggagctaagctataaggatgcaaaggcataagaatgatacaatggactttggggatttgaggggaagagtggaagggggacgagggataaaagactacaaatttggtgcagtgtataatgctctggtgatgggtgcaccaaaatctcataaaataggctgggcgcggtggctcatgcctataatcccaacactttgggaggccatggcgggtggatcacttgagatcaggaatttgagaccagcctggccaacatggagaaaccccgttctctacaaaaaatacaaaaattagctgggcatggtggcacgcccacctgtaattctagctacccgggaggctgaggcagaagaattgcttgaacccgggaggcagaggttgcagtgagccaagattgtgccattgcactccagcctgggcaacaagagcaagagtccatattaaatataaatataaatacatatatatttgattatatatatattcacaaaaaatacatctgagaaaattcctaaacttactctaagaaaggaaaacttaaatgagaatttctcacaaataaaatacatgattaatattaattttttctgaaatccacctcttttatgccctctgttaatattttcttaccttccaagtcctattaataaaatgcaatttacagttaaataatggaagtcaacataagtgaacaaatcttttcaaggtgacaaacccagggagtggtagtgctaattagaaaacagatgtgtctagaccgggcgcggtggctcacgcctgtattcccagcactttgggaggccgaggcgggcggatcacctgaggtctggagtttgagaccagcctgaccaacatggagaaaccccatctctactaaaaatacaaaaacattagctgggtgtggtggcacatgcctgtaatcccagctactcgggtggctgaggcaggagaatcgcttgaacctgggaggcggaggttgcggtgacccgagatcgtgccattgcactccagcctgggcaacaagagtgaaactccacctcaaaaaaaaaaaaaaagaaaagaaagaaaacagatgtgtctgactgatattcacccaccccattctgctcaccttaagtgctcaataaccaccctctcaggagacattacactatgccccaggtgcattttactttgtaagttcttgcaccatctcacttgggtcaggtttttctttgtcttttgggatacttttttttttccacaaaatttagagaattcagggggcagaaattatttctgtgttttcccctcaataccagcatctgattggctgaccagcactgtgtctccaagaaatggaagctgggttgggtgaagacaatcttaatgtctcaaggggttagcttttcaaaggaagagtatgccaggagatgcctctcagccccagggcatccacctgctcccttgagaagctacactccatacctcaggttgtcctcagggagaaaaatgacccaggagctgatattcactagacactctagcagaaaaagtcatgatgtgtatcttggtttactccagacagtactgaaacccaggaccaggaaaaaactgaagggtggctgaagacacatcactccgtaaagtttccaaagaaaaaccttcacctgaaaacaaacattctgataagatttctgtgcctgaggaagataaaaaaaaaaaagccatagaaatttcataaaatacagtgtcagggaattattttttgctttcttctcatgagaaatattttcaaccagaaaacaattttaagtgccatccaatgctttgtcaaaaaatgattaactaaaatacagtatcaaaaatgtacactaaaggaaaaacagttgagaatgtgaattaggaaaggcaagctggcatttggaaatgtcagaaggaactagaaatttagtattttagtttatttgcagtttaaatctaactgcaggccagagttaggctggaggaatggggctgggaggtacacttgagaccccgcttggaacgcatgtgaaaaatgcaggggaaaatcagtcccctgtggagtgtgagaataattaagtggcaggcaattacactgaggaggctctagtccccggctttctacttaacagcaacagctacgtaaatgtacctaaccgattattaaatatagttttcttcatcatgcaccttataaaaagtctttccttcaagctcctcccatgaaccacaaactacaaaacatacttttgtgctctacaattattgaatcactctttgattaaattctttaatattttttgcgatgactgccacagatttttaataggagaaaataggaaccgggaaccccacagaccaaagctcttcccattcatgaacccgaccccaagtcaggattctcccctgaccaccctcccatggtccctgcacaatctgggagaggcgcggcgctgccggtgcagagccgcccagagagggctgcaggccagggcacagtcactgcgcagggaagagacaggacgcccgggggcccggctgtcggcgcagccgccatcttatggctgaaggggactgaggccgagctaggcaaggagaactcggagcgcagattgtggagatgactgcggggagtcctgagtcccgccacagccacttcccacaggtttcaaccagcccttcccctctctcgggatgtcggacggcactctcaccatttctaggcttccagagggtcctggagtcttagctgtggatctcccaatacctgcaggtcacagagccacagagtctgggcctctaggagcagaggacaaacagcagtgaagacgagaccggagctccggctgcagcaagagacaaaggccgcgccaaacccggaagccgccctgtccggtccagctgcgtgtctgagtgaactgtccccagctcagagtccctgattggataatgttaaaacccgccccttcaggccctgagggacggaagatgtgatcagatgctgggctgaatgaagtgtgacagcctatgctgcagccttttcaggcaaggcttcctccctgagctgagccaggcccacccgagagggtgtttgcctttaatcttgtgtataaggtcatatgcccttataaataatatgctatatggctattcacaaatgaaaagaatataataacccaattgttctaaaaaaaattttttttttgagattgagtttcactcttgttgcccaggctggagtgcaatggcgcgatcttggctcatcgcaacctccacctcgcgggttcaagcgattctcctgcctcagcctcccgcgtagctgagattacaggcatgcgccaccatgcccggctaatttttttgtatttttagtagagacggggtttctccatgttggtcaggctggtctcaaactccagacctcaggtgatcctcccgcctcggcctcccaaaatgctgggattacaggcatgagccactgcgcccggcccaactgttctaaaattttatattttgtgaccttcctgacttctggtcctttgagcaggcagcctgagattttaaaaaggaggcaattctctgaaataaaatgtgagccacaagttgggcgctgtacctcacgcctgtaatcccagtacttcgggaggccgaagagggtggatcatctgaggttcagagttcgagatcagtctggccaacatggtgaaaccccgtctctaaaacaatacaaaaaaattagctgggcatggtggcaggcgcctgtaatcccagctacttgggaggctggggcaggagaatcgcttgatcctgggcggtggaggttgcagtgagacgagatcacgccactgcactccagtatggacaacaagagtgaaactctgtctcaaaaaaaataaataaataaaataaaatcataaaatgtgagccacatgtaaattttaaattttctagtagccaaactttattttatatttttatttttttagacggagtctcacattgttgcctgggctggagtgcaatggcgcgatttctgctcactgcaacctctgcctcccgggttcaagcgattctcctgcctcagcctcccaagtagctgagataaaaggcgctggccaccatgcccggctaatttgtagccaaactttaaaaagagtttagctctatttttaaaaagaaacaaagaacaggtgaaattgattgtaacaatttaacccaatatatcgaaaatattgtcattttaatatgtgagaaatatgtaattattaatgaagtgtgtctatatatatggaactaaacctttgaaactaactcgtattttacctttctagcacatcgcagttcagaccaggcgcattccaggcagccagtagcaacacagggccaatagctgctacattgaagtgcagctctgacatcaggagggtgaacgacctgaacatcccttttctgccggaggtgaggagagagcctctccctaccaacatctctcttcggttctgagggtagaacagacagtggtcatagacagagcagagggcaggccgggcggagtggctcacgcctgtaatcccagcactttgggaggccgaggcgggcggatcacgaggtcaggagatcgagaccatcccggctaaaacggtgaaaccccgtctctactaaaaatacaaaaaattagccgggcgtagtggcgggcgcctgtagtcccagctacttgggaggctgaggcaggagaatggcgtgaacccgggaggcggagcttgcagtgagccgagatcccgccactgcactccagcctgggcgacagagcgagactccgtctcaaaaaaaaaaaaaaaaaaaaaaaaaaaaaaaaaaaaattagctgggctggtggcgcatgcctgtaatcccagctactcgggaggcagaagaatcgcttgaacctggaaggcagaggttgcagtgagccaagatcgggtcactgcactccagcctgggtggcagagcgagactccgcctcaacaaaaaaaaaaaaaaaaaaaaaaaaaagagcagagggcaacaggaataaaataaccataggtaaaccactgctgaccacctattgccctccttccttctagagatcagacagtgaacaaaggatgatggggccaaaggagaagagaaccctatgtctcttcaggcccgtccacactcttgacctccaatttttagatatgaaaaaaaaatagattaaaggcaagcttatcttgctatttggccttggccctaatggtcaggccgtggttgtctattttctcctgtggtatgagggactgtgtgggtataggcaccaatcacatgcatacaatgtctacgtgtatttctgcattactcaatattaccttacaagacatccaactctaaatcagaggaaaaaatagtacctttagagtgtccactgtgtgaaggtaagtagtactgaatctgtcattaaatcctggcatcctgtctgcactgggtgcatgtattagttagctattgcagcataacaaaccatccaaaacttattagctcataattgaaatggtcagccatttgggctgggctcagtggggccatttctctagtctcagctgagcatttttagacatgtatcatcagctgcttgttgactaagcagctgtgtttctgggagtgagcttctgcttctggagctgtcaacaggggcaactttttttctcctttccatggtatcttattctctgactggccaacgtgggtttttcccatggagatggcagcattctgaaataaaaacagaagcattcaagaccatttgagcctgggccccaaactagcccactgtcatgtccacaggtttctactgccctgagcaagtacgacccgccagatctagtgttcagaaaacagattctggatctcaatggaacaactgtaaaagcacctggcaatgggcaagaatacaggaggatgaaaaattgctaccattttggtaatcattattattctgccctttttaatgtatgtggtttatagaactcttccacagaaagaaatttgtccaaagactaacggctactaagtggctgagctgagattcagaataaattctgacttcaaagcccatgcaccaccatagataacaatattacagaatctgccctagtcctttgaaatcctggagagtggaacttctacaatagaggacagaggtcctttagattcatgcccatatggtactgtttattattgagaataattctctcaagaaattccagaagcagacggtggcttaaacctgtaatcatagtactttaagaggctgaaatggaagaatcacgtgagctcaggagttcaagtgcagctttggcaacatggtaaaatcttgtctccatgaaaaaaaaaagtttaaattagccaggcataatggtgcatgtctgtagtcccagctactcagttggctggggcaggaagattgctggagcctggaaggtcggggctgcagtgagccatgatgggttacaccattacacttcagcctgggtaatagagtgagaccctgtctcaaaataaataaataaatacaataaattacagaagcaatttgaaaggacataaaataatttggaaaaatagctaaggattgagtttatgaaatcaaagctggcagggcatcgtggcttatgcctgtaatcccagcacttggagatgccaaggtgggtggatcacctgaggtgaggagttcgagaccatcctggccaatcatggagaaaccccatctctactagaaatacaaaactatctggacatggtggtgctcacctgtacacccagctacttgggaggctgaggaaggagaatcatttgaacccaggaggcggaggttgccatgagtggagatcctgccattgaagtctaacatgggtggcaagagcaaagctccacctccaaaaaaaaaaaaaaatcaaagcccagcaacacattatatatttttcatcatagaaaaaatttgggctgggcacagtggctcacacctataatcccggcactttgggtggctgaggtgggtggatcacctgaggttaggagtttgagaccagcctggctaacatggtgaaagctcgtttctactaaaaatacaaaaaatcagccaggcttagtggcaagtgcctgtaactcagctactcgggaggctgaggcaggagaattacttgaacccgggaggctgaggttgcagtgaaccaagatcctactattgcactccagcttgggcaacaagagtgaaactccgtctcaaaaaaaaaaaaaaaaaaaaaagccgaacaacacattatatatttttcatcatagaaaaaattggaaaacttttaaaagaaaaaaaactttagagaaataaaattaaatttaacagagtttaagtgagcaatgaataatttgcaaatcaggcagactgtggatccacagtaggctcagtgagactccagcacagccacatggtagaaaaatatttatggacagacaaagcaaagtgacattcagataatgaaagtgaggtacagaaacagcaagattgattaaagccaggaatttgccttatttgaacatggtttgaacagttgatgtcctcttattggcaacaacacagcagttggtacaaaaatggattccagtctatttacatatccaattagatttccatttactatatattaaaaaacctattaaccaaaattaaacacaataggaaacagctttaggctataatttaataatttttcccttttggacatcttctcaatgttgagaaatagaccagaactttagataatgatatcactctgttaccataaaaaaaatgtacttatttaggctgggcgtggtagctcatgcctgtaatcccagcactttgggaggctgaggcaggcagatcacctgaggtcaggagtttgagaccagcctggccaacatggtgaaaccccatctctactgaaaatacaaaacttagctgggcatggtggtgagcacctctaatcccagctactcaggaggctgaggcaggagaatcccttgaacccaggaggcagaggttgcagtgagctgagatcgtgtcattgcactccagcgtgggtgataagagtgaaacttcatgtcaaaaacaacaacaacaaaaagtacttaattagtctcaaattccactttaaaatagcagaactgtggattttgaaaagtggaaacaaagacttcaggttattagttttttaaaggattacagtagaggggacctccttgtgttcaaatctgctgtttacaaaagaaaagcaaaacctggcctgtagattctaaagatcttcctatttccttaaattttcagtttgattgtgtcacatttaccatgagtgactccatttggtttggtttggtctgtttgggcctagtgcacaagcttggtccagaatgatggccttcaataattttgtttaaaacattttctcctttaggttaagttctcacataggtcaaagtgcgaccaaaactcaggggtcttattgccactctcagtttttattattttgggtttttgtccttataatgtcattcataggttatggtgtccccatggtcacatatgtctttgagttttttttaatgccagttaaagagaaaccattcgggctgggtgtggtggctcgtgcctgtaatcccagcactttgggaggctgaggtgggtgaatcacaaggtcaggagttcaagatcaagccactgcactccagtctgggtggcagaacaagactccatctcaaaaaaaaaaaaaaaaaaaaaaagagagagagagaccatttgacattctagagatgactacatgcaaacatttataacttttgagagaatacactgcaaaagggagacactattttgactatcacaacaccacacccagctaattttgtatttttagtaaagatggggtttctccatggtggtttgactggcgagagcacacctgaacaaaggagggaagcaatttttatcagaaaaataataccacaacttttaagtatgctttttggccagggttcccatgaataaccaactgaaattaaatagatcaaatagttaactagacaaatggcctactcatttcaaccaggcagactgttcattaatccccaacaaccgaatctctgtaatactcaatgtatttctccacatgcaactacaagtattagcaactgcacagatacttctctttttatccagtaagtaatctagagaaattctattatttagaacaaacttaggcggaaaatttaaagtctataaatgttataagtaaaatgtttatttagaaacagaatgcttgttccttggtaccgcaaggaaaaattaacattcagacaaaaaattgtctcagcaaggcaattttactttctgcagaaagggtgctccccagatggaacaatggcaagagcacacctgaacaaaggagggaaacaacttttatcccttatgcagcttgtccctgctactgcatcctgtctccattagatggagctggaccacacaatctaagctaacccaactggctaataatttaaaactttcctaaataggtaaaggcaagggagaacaaaggaaaggaggaagttgtttatgccagatagggaaggggcataggctgtgagctggaacgtgcctgtgaacatgtccagcacaaatatcttggttaaggtacaaggacatagaatgtactatgtgcctgtgagcatgtctagcagctacataggatagggcttaacaaagagttattagcacaaagcaaggaggcttgaaggaagttagtctttaaaagaaactattacttttaatacttacaaattattctttaacaagaagggaaactttgaagaggaaactttttactttctacaatagagtatccgtaattcttagactagaatctgctatagagccctattatgggggataaatttctaaccattgtctcatttactctaaaccacggaaaagaataacctaccaagtgtgctcattcagaagaacaatggcctcctggcaatgctctttatcctattctgaataagttctctttaacttgtaaagtaagttaagagcaatgaaccaatattctgtttctgatgttatgaagcaacaaatgtcccattaaaatgtctcacccacattggccctttatctttaatctatcaaggcataagtttgttcatagataaggttgactgcaaaatcctctacatataaaaataaaacccatgagtgcacacaagagatcccttttttctttttctttttctttttttttttttctttttgagacatagtttcactcttgttgcccaggctgaagtgcaatggcacgatctcagctcactgcaacctctgcctcctgggttcaagtaattctcctgcctcagcctcctgagtagctgggattacaggcacatgcccccacacccagctgattttgtatttttaatagagatggggtttctccatgttggtcaggctggtcttcaacttctgacctaaggtgatccacatgcctcagcctcccaaaatgctgggattacaggcatgagccactgtgccagccttttatttcttttgtttgcagaggcaaaaaaaccaaaaacaaaacaaaaaaaaaaaccaaaaacaaaaaaaaaaaaaacagacaaacaacaaacagtgaactaagagtgtcatgatagcagaaatgtcttgatttttgatttcgtgaaaatagcaatctacatcaaggatgacatctccttttgaggagaaacattcctagttagctttaccttaagatctccaatgggtataaaattgtaagagtttggaggtctgcttcagagttgtgagattatgaacccaaggttcaaggtcctgaagtcttactgcagtgtagatggcaagcagatttaatctctgggttgtagattataaagacttactgtcctcagtcagtagactgttaaaaggctttctttacctggtgaaaatatgcttcatcataatacattaaaatcttgctgcatttagtcatactagacttcagtaacagaagatacaagaggatctatttttaggtgcataggccttcacctatagtccagtgactatgagggtcaacacttttttttcactctaagtgtatatgattgtcatcaatctgcaattatgaaagcaatccagtcaatgtagttagcttttctcatactattgtatccattataccttatttaacattttgaaaacttgcctagtgaaataagtatctttatcattagagactttttcagaaatgtcccatgagagaaacatttccttatatccttttagctactggtataacagcagatttctaacatcagaaagcttttctactttaagaaaacatgtgttataagggacaattcaataaaatttctgtgtaaatgtttaaatggcccatgggatagcagaaaacatgcagttttgattgttttctcatgtttatatgtttgacaaaagaaaaatgtcataacctattttaataatttagaatagtcaccccccaacacacacaaacacacacacttattttttatttatgtttgtctgtttatttatttattttgagacggagtgttgctcattgcccaggctgaagtgcagtggcatgatctcagctcactgcaacctccaccacccaggttcaagcgattctcctgcctcagtctcctgagtagctgggttacaggctcccgcaaccacatccagctaattttttgtaatttcagtagagatggggtttcatcatgttggccatgctggtctcgaactcctgacctcaggtggtccacctacctttgccaagaccagctcggctggggagaccctaacccagtggcgctagaggaattaaagacacacacacagaaatatagaggtgtgaagtgggaaatcaggggtctcacagccttcagggctgagagacccaaagagagatttacccacatatttaataacagcaaaccagtcattagcattgtttctatagatattaaattaactaaaagtatcccttatgggaaatgaaggaatgggccaaattaaaggaacaggttgggctagttaactgcagcaggaacatgtccttaaggcacagattgctcatgctatcgtttgtggcttaagaatgcctttaagcagttttccaccctgggcaggccaggtgttccttgccctcattctcataaacccacaaccttccagcatgggctttagggccattatgaacatgttatagtgctgcagagattttgtttatggccagttttggggccagtatatggccagattttgggaggcctgctcccaacatgtcccccttctctgatttgcaaatcgataaaagcaaaggcagctttgtcacagtgagctacttcccgcaggagtcaggatccacatctgcagactatacaaagacaaacaacacagatgaaaagcacaatcatcattgaagtcacagagttttcaagtgtttttatccattttcagctcctttaagtactccagttcctggcattaaggccaggtgtgcctgggatgctttaaatatttgttcttttaattttaaatccttatgttaagctccttgagtgggccatatcatttgaatttgaggtgccactatactgccatggttccagataataggaactcttgctgtacttcttattatatctaccatctgaccattttgttcagaccagctgaacatagtgtgggcctggcatgcagactgagaggtggaattcaagctaaacatccccttaggggaccaattaataatgattccataggaatcattgtgcagcacctctgcctgctctgcaatgcaatcttcctaaactagtaggttcattttttctaactgggtccaatcctgtttacaaataggtttttgagggtggtatgcctcaattataggagcagatttattatggtaaatactgagatcagaaagcatgtgtaactgtgtcataaagtgattgcatccaggcattattgccagccaagactgataaatataaccaataagtataattgttctctgtgtcagcccttattgaaggaatactcacagcagtggtgataaccactatcatagctaccattaaattattcgttgtgactggttgtctcgcttttctcaggtttttttctgccatttatgacagcttcttgatttgtccccaggtgggtggctgtgttcaatgggtgttgctcatgacagttggggtcctcctcagcatcactctcaacatggctgcaaccggggggtcctcaggatcctcccagagtcttttccttggcatctggctcatgataaggtttcagatgtcttgatggtatccaaattggctgttgattcagtcctggagaaacacaagcataacctctactccaagttattattttacctatttcccaactttttgttattggatctctccaccaaatcagttgttctgcttctgtctttgcaactggtttctgtagatgctgttcagctgctgataacatctggcctttgggtaggctcaaaaaatttaaagttaataatgctagattcaattgcatctgtggggtttcatattctctgtctccctctttctgcttttgcaactgctgttttagggagagattcattctttccactatggcttgtccctgagaattgtatgggataccagtaatgtgtttaatattccacatagagaaaaatgtaggtagagcttggctagtatagtctggggcattatctgttttaatagaagctggaatgcccatcaccgcaaaacactgcaaaagatgatgtttaacacaggcagaagactctcctgtttggcatgtagcccagacaaagtgagaaaagatgtccacacatacatgtacataagctagtctcccaaacaagggaacatgtgtgacatccatttgccaaagagctataggttccaatcctcaaggattaactcctcctgtaaaagaagaggaatgtaccatttggcaagttgggcatcactggataatagttttagcttctttccaggtaatgctgtatctgcgtttgagaccagaggcattagcatgggttaaattgtgaaaatgtctagcattagatattgcattagcaactaggcaatcagctatctgattccctttagtcaaaggtcctggaagaggtgtatgagcgagccctaatgtgagtgatgtaaaaaggatgcagtctattcctaactgctgtttgcaattgggtaaataaaatcatcaggtgttaatctgtatgaaatcataactgagcattttcaattaactgtgtggaatgaaccacgtatgaagaatcagaaatcacattaataggcatatcaaaagcagtcaatacctcaattacagctacaagctctgcttttgagctgaagtatagggcatctggaaaactttacttttcgagccagaataaggagctttacaattactagacctatctgtaaaaacattctcagcaccttcaatttgtttaaatttagttatttcagggagaatccaattagttaatttcaaaaactgaaacagctccattttaggaaaatgattattgagaatacccacgaagtcagctaaatgagtttgccaagtaagactatttataaaagcttgctgtatttgtgcattcatgagagagacaataacttttccaggatcatatccatgtaatttaacaatccgagttctcccaattcctatcatagttgcaatttgatctaaataaggagttagagtccatgaattagtatgtggaagaaaaagccactctactaagtcctgtttttggataataacaccagtaggtgaatgctgagttgaaaaaattagcaaatctagagtcttctctggatctattctatttacttgagctttatggacttgcattttaattagttgtaacccttccttagcctgctttgttaattgccaagggctagtaagactaggatttcctctaaggatagaaaacagattacttgtggcataggtaggaatgcctagagcaagtcgtatccaattaatgtcccctagaaatttttgaaagtcatttaatgtttttagttgatccctatgtatggttaccttctatggcacaatggtagtgtcatttactaaggtccccaagtaggagtaaggagtagtagtctgaattttgtcaggggctataattaaaccagcatgaggagtcaaattttgcaagtgaccataatattggaataatatttctcaagtgggggcagcacaaactacattatccatatagtgaataatgtaacactgtgaaaaatattttatgagtaggttcaattgcttaccccacatacgtctggcaaattgtaggactgtttaacatgccctgtggcaacgctttccaatgataacacttagcaggctgcaggttgtttattgcaggaattgtaaaagcaaaccattcacagtcttgctcagctaaaggcatagtaaagaaacagtcttttaaatctaggactactaaaggccaagtttttggaattatagcaggagaaggcaatcctggctgtaatgctcccataggttgtataactgaattgatggttcttaagtcagttaacgttcttcatttacctgatttttttcctaattacaaaaactggagaattccaaggagaaaatgttggagctatgggcccattttctaattgttcagtaactaatttctctaaagcctccagtttctctttatttagcagccattgttctatccaaattggcttatctgttaaccattttaaaggtataggttctggaggcttaacaatggccaccatcaaaaatgatatcctaatctttggcagaaattttgtcttccacttgaagccgttctttcaaaccttgcaaaattttttccagtcccatgccagggacataccccatttcatgcattgtatgttgactttgagggctatataatttttctggaattagaatgtgtgctccccgttgttgtaataaatctcttccccataaaattataggtatagaagtaataattggttgaatagtcccaggttgtccatcgggcccttcacaatgcaaaatataactactttgatatacttcaggggctttaccaactccaactatgttaaattgagtgggttgaattggccacaaggatggccagtgctgtagagaaatgattgaaacatctgcttctgtatctatcaaacctttaaatttctttccctgaatagttatttcacaggtaggacatttatcagtaatttgatttacccaatacgctgctttgccttgtttatttgtgcttccaaatcctctttttcatttagtttcactttttcccattcccacatatggcacaatcaggagctgtgctatacactctcctggctctgctttccagggaacagaagtagatacaacaatttgaatttccccattgtaatctgaatcaatgactcctgtatgtatttgtatgccttttaaacttaaactagaccttcctaaaagtaatcctattgtccccactggcaaggttccacagactgctgttgggaccttttgcgggggttgcccaggcagaaggctcacaggtttcatgcagcataaatctactgtggcagtactggctatggcaggggacagacattgtacgggggtgacggaatggcctgagctggaaatacccccttttagaacggggcctgggaagggcccctcatggcgtttcctgaaattgggttcccttctttatcaaacttagagtgacattgattagcccaatgttttccttttttacatttttgacatatttcaggatcagcaattttcttttttcccctatctggcggcctgacttctacattcctttttagtatgaccatgcttcccacagttaaaacaagctccagaaaatggatttatttcctttatccactctcagtcctgccattgcctgttctaccagagtagctttatgcagattacctctaataccatcactggccttgatataatcaactaaatgtgctttccctctgataggtcacagagcagcctggtaatcgggattagcattgtcaaaagctaataagtgcaacactatatcctgagtagccaaatctgcaatcatctttttaagagactcctgtaaccgagctataaaatcaatgtatggttttcttggtccctgttttatagcactaaaggaagggtatttttccccacttgaagtgatttttttcccaagctttaatgcacactcctctaagctgttctatggcatcatcctgcatgaccagttgtgcatctaaaccagcccagccgccaacccccaaaagttggtctgagttatatcaatttgaggatgggcctggccattgttagcagcctgaatggaagcttcatctgcccaccaagttttcaattgtaagaactgagcaggagttagacaaactcaagtaagagtgtcccagtcagtaggaatcatctgactggaaacagcaacattctttacagttgttacattacaaaacagtcccattacaaaaggagaacctggtccatactgattaatagcttctttaaattatttgagtaatttaaaaggaaaaggctcaaatgtagccgtaatatttccctgttgatctggggggtgtattctaacagggaactgccaagcctctaaatcaacctctcgtctagcttgctgaattcctgcctgaatagaactaagagtggtcactcgaggcgctgtttgaacagtcactggggcaactacttttcatccagtgtcctctggaaaagaaagatctggagggtctttttcttcaaaataataaggagggtgtgcagaagggtagggatgaacctctccttcctttgccgctttctctttagctggtaaataaacatgctctgtaacctcttctgttactttgctgtactctcgttcctcctcattagtgtgaaaaagttccaaagtgaaacgaaccagaccccacacctgtcctatttttaccctgatgcttctgagctccccctcttactcaccacggggattgctttaagagtactcaggtgtcctccagttagttctccattccaaagattgctccagtgaccctttgacctggattcgagccccaatgatggatgccacttgccgagaccagctgggtgggggagaccctaagccagtggtgctagaggaattaaagacacatgcacagaaatacagaggtatgaagtgggaaatcaggggtctcacagcctgctgagagccccaaacagagatttaccacatatttattaacagcaaaccagtcattagcattgtttctatagatattaaattaactaaaaatatcccttatggaaaatgaagggatgggccaaattaaaggaacaggttgggctagttaactgcagcaggagcatatccttaaggcatagatcactcatgctattgtttgtggcttaagaatgcctttaagcagttttccaccctgggtgggccaggtgttccttgccctcattccggcaaacccacaaccttccagtgtgggcgttagggccattatgaacatgttattttgctgcagagattttggttatggccagttttggggccagcatatggccagattttggggggcctgctcccaacatgccttggcctcccaaagtgctgggattacaggcatgagccactgcacccggccctatatttatttatttatgttttctttttgagatggagtttcactcttgtcacccaggctggagtgcaatggtgtgatctcggctcactgcaacttccgcctcccaggttcaagtgattctcctccttcagcatcctgagtagctgggattataggtgcccaccaccatgcctgactaacttttgtatttttagtagacatgtggtttcaccatgtttgccaggctggtctcaaactcctaacctcaggtgatctgcccaccttggccttgcaaagtgctgggattacaggcgtgagccaccatgcccagcctaatttatatttaatttagattattttatctcatctgtgatatgtaatggaatacagcactttcaataacggaagctataagaactcaggaataaacaaggggctgttggctttctaggttttccatgagtccacacttaacataaaatttatttcctcttaaatactaggctttgtttctccaatttagttgcattgcactgataactgtcataggtaattgacttaaaccacagggtttattcaaatgacatatctgaaaaattcagtactagctgatttaccataaatatgagacagagtattttcaaaatatttaattaatatttattttgcctgggttataaattttatgagtcagtctcttcattagaactcacataatccttacccagtccaaacaatatgatcctcaaattatcagaaacctgtactcaatttttctgggccatttttatcttttcataaaccttcttaaagacacaatactctagaattttgcatgcttttgaagtttttagaaactatatcagaattaacctgttaactgtagaaatgacttgaaatggttataaaggaacaaatgaaaagaagttcattatatctgtggcctacaataatttatcataatagccataattatgactaatagcatatactcaggtatattagatttttagaaattgtaggccaggtgtggtggctcatgcctctaatcccagcactttgggaggtcaaggttggtggatcatgaggtcaggagatcaagaccatcctggccaacatggtgaaaccacatctctaccaaaaatacaaaaaaaaaataggtaggcatggtagcatgcacctgtagtcctagctacttgggaggctgaggcaggggaatcgcctgaacccaggatacagaggttacagtgagccaagattgcaccatttcactccagcctgggtgacagagcaagacaaaaaaagaaagaaagaaagagagaaagggggtagggagggagggagggaggatgtatacaattttggaatacatttttttgtttgtttgtttgttttgttttgtttttagagacagagtttggttctgtcacccagtctagagtgcagtggcgtaatctcggctcactgaaagctccacctcccaggttcacgccattctcctgcctcagcctcccaagtagctgggactacaggtgcctgccaccgcacccagctaatattttgtatttttagtagagatggggtttcaccatgttagccaggatgttctcaatctcctgacctcgtgatccacctgccttggcctcccaaagtgctgggattacagatgtgagccaccgcgcctggccttttggtttttatttttgagacggagttttgctctgtcaccaggctggagtgcagtggctcactgcaacctccacctcctgggttccaatgattcttctgcctcagcctcccgagtagcagggactgcaggcatgcatcaacatactcagctaattttttgtattttagtagagacagggtttcaccatattggccagaatggtctctatctcctgacctcatgatccacctgcctcagcctcccaaagtactgggattacaggcttgagccaccacacccagcctttggactaaatattaataacatttattaaaataaaagtttgatcaaacatttttaatttaacaatgttttccatttaatttaccatatcagataattctgttcttcactctttgggatgctgcgttggccctctgtaacatccaaaactttgggattaaaaaaaagacaattttttagctgaaatgtgattttgtgaagcttgtcaaatatgtcaaagggttgccaggcatggtgactcatgcctgtaatcccagcagtttgggaggctgaggtgggtggatcatgatgtcaggagttcaagaccagcctggccaagatggtgaaaccccatctctactaaaaatacaaaacttagccaggcgtggtgacaggcacctgtaatcccagctactcaggaggctgaggcaggggaattgcttgaatccaggaggcataggttgcagcgacctgagatcatgccactgcactccagcctgggtgacagagcgagactcagtctcaaaaaaaaaaaaaaaaaaaagtcaaagggttaaaatgctttaccaaaataggatcacatggcaccataaaataatagtcattcacttaaaaatgtgataataaaaggattttaaaaaacaaaaccattaccacttgatataagagattgagttttccaattaaaacacctgagaaagacagcatgaaaaaattctatctctactttctttgttttcaaatttgttcaaaaagtgaacaaaaatattttactttgtcatattattaatacataagacttttgttccagagaaaatcaatttctagttttgtattagtgtattatctatactaaagctcattttaataaaactttataaataaatccaccaaatttgtcacttttgaccactctagatttccatacatgttttacaatcttttatagttaattctttaactttttatattctgtctctattctttttattttttcatttttcaacaatctctaatttcaaacttatcgggggaaccagcccccaatatttccatgtatgttcttttctattttccttaagtgtcagccagtctgagaaataaacagaaagagtacaaggagagaaattttacagctgagcctctgggggtgtcatgacatattggtaggactgtgatggcgacctcgagctgcaaaaccagcaagtttttattagggattttaaaaggggagagggtgtacaaacagggagtaggtcataaggatcacatacttcaaagggcaataaagatcacaaggcaaggcaaattagaattcctgatgaaggtctatgccccaccgtgcacacattgtcttgataaacatcttaacaggaaacagggttcaagagcagagaaccggtctaactagaatttagcaggctggaatttcccaatcctagtaagcctgagggtactgcaggagaacggggcatatttccgtccttatctcaaccacataagacagacactcccagactggccttctatagacctacccccaggaaggcattccttccccagggttatcaattattaatattccttgctgggaaaataattcagtgatacttctcctattcacacatctgtctataggctctctgcaagaagaaaaatatgactgtattctgcccaaccccacaggcagtcagaccttatgtttatcttcccttgttccctgaaaattgctgttattctgttctttttcagggtgcactgatttcatattgttcaaacacacatattttacaatcaatttgtacaatagtggtcctgaggtgacgtacattctcagcttatgaagataacaggattaagagattaaagtaaagacaggcataagaaattataagagcattattagggaagtgataaatgtccatgaaatcttcagaatttatgttcagagattgcagtaaagacaggcataagaaattataaaaatattaattttgggaactgacaaatgtccatgaaatcttaacaatttatgttcttctgcctcagttccagctggtccctctgttcagggtctctgacttcccacaacacaaactagaggaaactttcccaatttttttatcaaaaagtagtttttacttgtctatacattctatgcagagttgtttttcttacatctagtagttttaattacatacgttaattacattaactctgaacaaccaaatttttagtgaaatctcaaggaagtaattttgaacagtttcatatcagtatttgtgacaaaaacaattttatattttttaaaaaagacgattttctcaaattttctgttaactaacagatctaaatctatttagttttttaaacatcatataaaaataagattccagtaaatcatggtgtctcacacttgtaatcccagcactgtgggaggtcaagacatgaagactgtttaagcccagaagtttgagaccaacctgggcaacatagtgaaacccacgtctacaaaagatacaaaaattagttgggcatagagccctccacctggagtacaagctattcaggaggctaaggtaggaggattgcctgagcctaggagtttgaggctacagtgaaccatgatggagccactacactccctccaaagtcacagagtgagacactttcttaaacaaaaaaatgctaatgtatataaacttaaacttatgggtttctttgctcttattattttaatagttattggggtacaggtggtgtttgctggtgatttctgaaattttggtgcactcatcacctgagcagtgtacattgtattcaatgtgtagtcttttattcctcaccctctcccatccttctcctcaagtctctagagtccattatataattcatatgtctttacagcctcatagcttagctctcacttataagtgagaacatacaatgtttggttttctattcctgagttacttcacttggaataatggtttccaactccatccatgttgctgcaaatgccattatgttgtttctttctatggctgagtagtattatgtataccacattttcattgtttactcattggttgatgggcatttaggctggttccatatctttgcaattgccaattgtgctgctataaatatgtgtgttataagtttcattttgttgttgttgtttttttttgagatacagttttgctcttgttgctcaggctggagtgcaatggcgcgatcttggtttactgcaacctccgcctcaccagctcaagcaattctcctgcctcagcctcccgagtacctaggattacaggcatgtgccaccatgcctggctaattttttatttttaatagagatagggtttctccatgttggtcaggctggtctctaactcccaacctcaggagacccacccaccttggcctcccaaagtgctgtggttacaggcgtgagccaccgtgccaggcccacaagtttcatttttatgtgacttctttttctgtgtatagatactcagtagtgggactgctgaataaaatattagttctatgtttagttcttttaagaatctccatactgtttttttatagtggttgcactggtttacattcacatcaaaagtgtaaaagtggttttttttttaaccacatccatgccaatgtctatttttttgttttgttttaattatggccattcttggcagggcacaatggctcatgcttgtaatcccagcactttgggaggctgaggtaggtggatcaattgaggtcaggagttcaagaccagcctggccaacatggtgaaactccatctctaaaaatatatgaaaattagccaggtgtggtggtaggtgcctgtaatcccagctattcgggaggctgaggcatgagaattgcttgaacctgggaggcggagattgcagtgagccgagatcgtactgcactccagcctgagcaatagagcaagactcaagtcccaaaaaaaaaaagaaagaaagaaagaaagaaaaggctgggcacggtggctcacacctgtaatctcagcactttggaaggccgaggcaggtggatcacgaggtcaggagatcaagaccatcctggctaacacggtgaaaccctgtctctactaaaaataaaaaaacaaaaaaaattagccaggcgttgtggtgggcacctgtagtcccagctactcgggaggctgaggcaggagaatagcatgaacccgggagacagagcttgcaatgaaccgagatcgcgccactgcactccagcctgggtgacagagcgagactccatctcaaaaaataaaaaattatggccattcttttttttgacatgaggtttcactcttgttgccctggagtgcaatggcataatctggctactcttacaggagtaaggtggtattgcatcgtgcttttgatttacattacaaatcaaagtcccatttatttatcttcacttaattgtatttgcttttgggttcttggtcatgaagtctttgcctaagccaatgtctacaaaagtttttctgatgttatcttctagaattgttagttacaggtcttagatttaagtctttaattcatcttgagttgatttttctatgagagatgaagatccagttttattcttctacatgtaccttgccaattatcccagcattatttgttgaatagggcattcatttcccactttgtgcttttgtttactttgtcaaagatcagctggctgttagtatttggctttatttctgggtttgttattctgttccattgctctatgtgcctatttttataacagtaccatgatgttttggtagctacagccttgtagtacagttttaagttgggtattgtgatgcttctagatttttgtttgtttgtttgttttgcttagttttactttggctatgcgtgcttttctttggttccataagaattttataattgttttttcaagttctgtgaagaatgatgttattctgatgggaattgccttgaatgtgtagattgcttttggtaggttggtcatttttaaagtatttactctacccatccatgaaagtcagatgtttttccatttgtttgtgtcatctgtgatttctttcagtagtgttttgtagattttcttttagagacttttcacttcctcggttaggtatatttatttatttattattattattattttttttttgagatggagtttcgctctcgttgcctaggctggagtgcaatggcatgatctcggatcaccccgatctccacctcccaggttcaagcgactctcctgcctcagcctcccaagtagctgagattacaggcatgtgccaccatgcccagctaattttgtatttttaaaagagacgaggtttctccatcttggtcaggctggtcttgaactcccgacctcagtttatctgcctgcctaggcctcccaaagtgctgggattacaggcatgagccaccatgccctgccacggttaggtatatttctgattattttattttattttttgcagctgttgttaaagactttgtgttcttaatttgattctcagcttggtggctgttggtgtatagcagtgctaccaatttgtgtacattgactttgtatcctgaaacgttactgtatttatttgtcacatctaaaagcttttcgggtgagtctttagggttttctaggtatatgatcttatcatcagtgaacaataacatcttcacttcctctttaccaatttggatgtcctttatttctttgtctcatctgaatgttctggctaagacatcctgtactatgttggatagaagtggtgagagtggccatccttttcttgtttcagttctcagggggaatgctttcagcttttccttgttcagtatattgctggctgtgggtttgtcatagatgacttttattcccttaaggtatgtctcctctatgctgattttgctgagggttttaatcattaagggatgctgaattttgtcaaaagctttttctgtatctattgagatggtcatacaatttttgtttttaattcagtttatgtggtgtatcacatttattgacttatgtacattaaaccattcatccatctctggtaggagatgcattgtatcattgtgtattatctttttaatatgctattgtattttgttggctagtattttgttaagaatttttacatctatgatcatcaggaatattggtgtgtagttttcttttcttgttatgttttttcctggttttggtattagggtgatattggcttcatggaatgatttagaaataattctttcctactctatttttttgaatagtttaagtagaattggtaccaattcttgtttaaatggcaggtaaaattcagctgtgactccatttggtcccagagtattttttgttggcaattatttcaatcttgctacttgttattgatctgctcagagtttctatttcttcctggtttactccaggagaattgtatatttccagaaatgtattcacctcttctaggttttctagtttgtgcatttcataatattcatagtagccttaaataatgttctgtgtttccgtgggattgcttgtaatatatcctgttttgtttcaaattgagtttatttgaatcttctctcctttccttggttaatctcgctaatggcctatcaatttcatttatattatcaaagaatgaacttttttcatttatcttttgaaatttttgtttcaatttcatttagttctgcactgatctttgtgatttatttttctgctgggtttgggtttagtttgtttttgtttctctagattctagaggtatgagcttagatttttaaatttgggctctttcagactttttgatataggcattgttatgaacattccctttagcactgcttttgctgtattccagaagttttgataagttttgtcactgttatctttcagctcaaagagcttttatatttccgtcttgattttattgttgagcaaatgattattcaggaaaagattatttaatttccatgtatttgtatagttttgagggttcctttcatagttgatttccagttttattccactgtgatctgagcgagtacttgatataatttcaattttcctaaatttattgagacttcttttgtggcctatcacatggtctatcttggataatgtttcatgtgctgataaaaaatacacattctgcagttgttgggtagaatgttctgtaaatatgtgttaagtccatttgttctagggtatattttaagtttattgtttctttgttgactttctgtcttgattatctgtctactgctgtcagtggagtattgaagtcccctactataaatgtgttgctgtctatctcattgcatttttttctttcttttttttttttttttttttgagatggagtctcactcttgttgcccaggctggagtgcaatgacacgatctcagctcactacaacctctgcctcccaggttcaagcaattctcctgcctcggcctcctgagcagctcggatttcaggcacccgccacaacccccagctaattttttttttttttttttttttgtacttgagatggagtcttgctcttgttgcccaggctggagtgccatggcacgatcttggcccactgtaacctccgcctcctgggttcaagtgattctcctgcctcagtctcctgagtagctgggattacaggcacccaccaccacgcctggctaattttttgtattttagtagagacggggtttcaccatgttggccaggctggtcttgaactcctgacctcaagtgatccacctgcctcggcctcccaaagtgttgggattataggcgtgagccaccacacccagccaactaattttagtatttttactagagacggggtttcaccatgttggccaggctggtctccaactcctgacatcagatcatccacccgcctcggcatcccaaagtgctgggattacagtcgtgagccacctctcccggcttaaagttttttttctttaaaagttttcaaacatttgctatgatgaaaaataaataatgtgctgttcagctttgatttttttttttttttttttttgagagagagtctcgctctgttgccaggctggagttcagtggcacgatctcggctcactgcaacctctgcctcctgggttcaagcgattctcctgcctcagcctcctaagtagctgggactacaggcgcccgccaccacgcccagctaatttttgtatttttagtagagatgggtttcaccaggttggccaggatgatctcaatctcttgacctcgtgatccgcccacctcggcctcccaaagtgctgcgattacaggcatgagccaccacgcccggcctcagctttgatcttctaaactcatccttcatcttttccaaaaattattccatgtcttttcaaaatgcttctccagttttgtttttttttttcttgaaacagggtctcactctatcacccagttttgcttgcaatggtgtaaccaatcatggctcactgcagcctggaccttccaggctcaagcaatcctcctgcctctgccacctaactagctgcagctacaggcatgcaccaccatggctggctaatttcttcatttttgtcatgaaaacaaactcttattatgttactcaggttgcactggaactcctgcgctcacataattctcccatctcagcctcccaaagtgctaaaaatataggtgtgagccactgtgttcttctgcaaatttttttttttttttaatacagaggctggctctgttgcccaggctggagtgcagtggcacgatctcagctcactgcaacctctgcctccccagttcaagtaattctcctgtctcagcctcctgagtagctgggattgcaggtgcacaccaccacgtctggctaatgtttgtatttttagtagagacagggtttcaccatgttggtcaggctgctctggaactcctgaccccatgatccacccaccttggcctcccaaagtgcaaggattacaggcatgagccactgcacgtggcctcttctgcaatttcttaagaggattatttccagtgataaacagtagtatatgaacacaaacctaaaaggaatctgacttattctgtagaagtgtcactctccaggatttcaagggtctagggcagggcagctactttagtagtatgatctatggaggtgcatgggctttggcgtcagataaagttgatcctgagtcttattccagtcacttagtactcgtgggtctttggacatgtttgttgatgtggagaagctctatataccacatatgcaaaaaaggtagactgatactgattgcaaaatggcagcaatttttctgccctcttgtatctatgcccattgtcaggtgcttttacagctgtttccatcaagatccagaatctgtcttctaaaccctagatctggctggccttatttgctcagggcagtagaaacttgtgaacatgacagtgggctagtttggggcccaggctcaaatggtcttgaatacttctgttttttgttcagaatgctgcaatctccatgaataaagcccatgttagcaagcttaaaaataagataccatgaggaggagaagcaaggtgcccctgttgagccccagaagcagaagatcacccccagaagtacagctggctagtcaacaagcagctgatgataccagtctgaaagagctcagctgataccagaagaacggccccactcacccagcctaaatggctgatcatcttaattataaactagtaagttttggatgatttgttatgctgcaatagctaactaatacatgcaccagtgcagataggatgccaggattcagtgacaggttgattacttgttgccttctaacagtgggcaccctctaggtactgatttcttcccctaatttaaagttggatgtcttgaaagagaatgttgggtaatgcagaaatactgggagacatgtatgcatgtgattggtgtttatattcgcacagtccccacaccacaggagaaaacagataaccacagcctcgcaattagggtcaaggccaaatagcaaaataagtttgcctttaatctattttctctgtatctaaacactggagtccaagaatgtgggcagaactgaagacacagagtttttttctcctaagctccatcatcctatgttcacagcctaatctctaaaagaaaggtgggcaacaggtggtaagcagtggtttacctgtggttattttatttctgctgccctcagctctttctatggccactatctgttccaacctcagaactgaagatagatgttagtagggagaggcccttccttcccctctggcccttcacaccattgacatcagagctgccatgtgtggctcctgggtgcctggaatgtgcttggtctgaaccgcgatatgctagaaaggtaaaacacagagttattttcaaaaatttagttgcaaatatttatatacttcattaataattacatattcctcacacattaaaatgatattttgtatatattaggttaattacattgttacaatcaattcaacctgttccttgttattgttgttgttgttgttgctgttgttgcagtctgtcactaggctggagtgcagtggcgcaatctcggctcactgcaacctctgcctcccgggttcaagcgattctcctgcctcagcctccccagtagctgggattacaggcatgcgccaccacgcctggctaatttttatatttttttcagtagagacagggtttagccatattgccaggagggtctcaatcacttgatctcgtgatccaccagcctcggcctcccaaagtgctgggattacaggcgtgagccactgcgcgtggcctcttgtttctttatatttttcaccccccaaaacggagtctcgctctgtccgcccaggctggagtgcagtggcgcgatctctgctcactgcaacctcctccgcctcccgggttcaagcaattctcctgcctcagcctcctgcgtagctgggattacagatgtccaccaccacgcccggctaatttttgtatttttagtagagacgtggtttcaccatgttagccaggctggtctcaaactcctgacctcttgatctgcccgccttgtactcctaaagtcctaggattacaggcgtgagccaccatgcctggccccttgtttctttttaattttctagtttggctaccagaaaattcaaaattcacgtggctcacattttatttcagaggattacctcctttttaaaatctcaggctgcctgctcaaaggaccgtaagccaggaaagtaaaaaaaccctgaaattttaaaacatttgttattatatccttttcatttatgtatagccatatgatatagtatttacaaatgcatatgaccttatacgcaaggttgaatgcaaataccctttggggtgggcctatctcagctcaaggaggaagccctgcctgaaaaggctgcagcctaggcggtcactctttcttcattcagcccagcatctaattacatcttctgtcagtcagggcctgagagggtggggttttaaacgttatccaatcagcgacgctgggctgggaactgtccaatcaggcacgcagcttgagcggagaggacggcttccgggatgtggcgggatttgtccgcttctttgtctttggctgccgctggaactccgggtctcgtcttcactgctctgtgtcctctgctcctagaggcccagcctctggtcctgtgacctgcaggtattgggaatccacagctaagacgccgggacaccctggaagcctagaaatggtgagagtgcggggtccaacatcccgagagaggggaagggctggttggaaccggtgggaagtggctgtggcgagactcaggcctccccgcagtcagctctacaatctgcgccccgagttctccttgcccagctcggcctcagtcgccttcagccataagatggcggttgcgccgacagcccggcccccgggcgtcctgtctcttccctgcatagtgactgtgcccttgcctggagccctctctggggaatctctgcacccgcagcgccgcttctctaccggattgtgcagggaccgtgggagggtcgtcaggggagaatcctgacttggggtgcgggttcatgaatgggaagaggtttgttccgtggggttcccagttcctattatctcctattaaaagttaatgggagtcactgcaaaaatattaaaagaatttaatcaaagagtggttctaggctgggcgcggtggctcacgcctgtaatcccagcactttggaaggccgaggtgggcggatcagaggtcaggagatcaagaccatcctggctaacacggtgaaaccccgtctctactaaaaatacaaaaaatgagccgggcgtggtggcgggcgcctgtagtcccagctactcaggaggctgaggcaggagaatggcgtgaacccaggaggcagagcttgcagtgagccgagatcgtgccactgcactccagcctgggcgacagagcgagactcttgtctcaaaaaaaaaattaacttattaaataatttaatcaaaaagtggttctagaattgtagagcaccaagctgtggtttttagtttgtggtctatgggagaggcttgaaagaaagtcttttgtaaaatgcatgatgaagaaaaccaaatttagtaattggttaggtacagttacgtggttttttaatttgtacattaaaggtgaaaatttcctggttatgtaatcggagctcaattggcagtttatagtaggtgaagcctcaattttgtttctctgaatttagtaattaaaaataatgcgcctgagttagattttttaaattgaagtaggaacccagggactagagaaacctcagtctaattgcctgccacttaattattttcacactccacagggaactgattttctgctgcatttttcacctgggtcccaatcagggtcttaagtctaacccccatccctcattactccaacctcattcttgcttgcagtaagatactaaatttccaatttcttctggggttcccaaatgccagcttttcctccctaattcacattatcacgtatttgtgtttttttgtttgttttgttttgtttttgagatggagtctcgctctgtctcccaggctggagtgcaatggcgcgatctcggctcacctcaacctccgcctcccggttttaaacaattctcccacttcagcctccttagtagctgggattacaggtgcgcgccatcatacctggctaatttttgtgtttttgtaaagacgggggtttcaccatgctggccaggctggtctcgaactcctgacctcaggtgatccgcccgcatcagcttgccaaagtgctggaattacaggcgtgagccaccgggcctggccacttattttgtagtgtacttttttataccgtattttaattaattattttttggcaaggcattaaatggtgcttttttcttttcttttttttttgagacggagtttcactcttgttgcaaaggcacattctcggctcaccacaacctccgcctccgggttcacgaggttctcatgcctcagcctcccaagtagctgggtttacaggcatgcaccaccacgcccagctgattttgtatttttagaagagatagggtttctccatgttggtcaggctggtcatgaactcccgacctcaggtgatccgcccgccttggcctcccgaagtgctgggattacaggcgtgagccactgcgccctgcataaatggtgttttgggggtttttttgtttgttttttgttttgagacggagttttgctcttgttgcccaggctggagtacagtggcatggtctcggctcaccgcaacttctgcctcccgggttcaggcgattctcctgcctcagcctccgagtagctgggattacaggcatgtgccagccaccacgcccggctaattttttatttttagtagagacagggtttctctatgttggtcaggctggtctcgaactcccgacctcaggtgatccgcccgcctcggcctcccaaagtgtggggattacaggcgtgagccaccacacccagaccaatggtacttttaagaaggtttgttatctgtttgtaaatattttccatgaaaagaaagcaaataataatcccctgacactgtgttgcaaaaaatctctgtgtgtcttttccttttatctttctaggcacagagatgttatcggaatttttttgggtcagagttctgctttggaaaatttatggggtgatgtgtcctcagccaccgtttagttttttcccggtcctgggtttcagtattatctggggataaaccgagatatctgccatggttatgtcagctagagtgtctagtggatatcagcttctggtttattttctcccataggacgacctgaggtatggagtgtatcctgtcaagggggcaagtggataccctggggctgagaggaatcttctggagtactcttattttgaaaaggtaaccccttgatatgttaaaattgtctttgggaccagcttgaaaaacatgctctactaaaaatacaaaaaacttagccaagcatggtggtgcatgcctgaatttccagctactcggggttgctgaggcaggacaatcacttgatcccgggaggcagaggttgtggtgagccgagatcctgccattgcactctagcctgggcaacaagagtgaaactccatctaataataataataatgataataataataataataataataataataataatgaataaattgtcttctaccaaccctgcttccatttcatggagacaaattgcttgtcagccaatcagatgctggtaatgaggaacaaacacagtaataacttctgccccctggattctgtaagggagcagaagaatagtgaaataaatatagtaaaagaaaaagagtaaaaaacagtgaaaaatatgtgaccaaaaaaatagtatcccgaaagacaaacaacaaaaacaacaacaaactgactccagtgagatggtgtaagaacttgcaaagtaaaatgcacctagggcagtcaccgaaaaatagtgcagtgtctcctgaatgggtggttcttgagcacataagtgagcaggagtgggtggaaggatctctcaagtgattgaatggcctgacttgaaacgtgagtcagacacatctgttatttaaccagcactgccattcctggatttgtcaccttgaagagatttgttcacttattttcacctgttttttagctgtaaggttacattatattagtagggcttgaaaggtagaaaaatatttacaaagggcataaaagacgtgggattcaaaaaaattaatcatatatttcatttgttaaaaattttcacttacctttttctttcccagagtgagtttacaagttttctcaggtgtagcttttaatggctgggtgatttcaaacagaatttcaagcttagctttcagaatgctaccaagaaaaagaagaggaaaaatgtctattccatttttgccgtagaaaatgaatacgtttccacaagaaaatgtggtagataattggtgagttacatagattcatgaaaacatcagttcctttttttggcagggtaaatttttgacagcgaatatctctgttcaaattctgttatcttgatttctgagttttatgctaaattttatgagatgaaacttggtattgcctggaagtgtttccatatgactaaatgtttgctgcatgatttttaatggaattaatagaataatacatttattttctgatagaaatacttttgcttttcttattaaggtataaaatgtaagcaccttaaaattttcttcccttataggaatactgtgtttgagtaatttttttggatttttcaaacaacttagtttcaaaaaccaagtgagcaactctaacatggaaattaaagcttgagcccagtgactcagagctagggcttatattgagactgtaaaagtaggttattaaaggtccagttagttttttctggagtgcctctcctgcagatgttctagcctgctcactccagtcatggaagaagcctttctgatgagagaagctagagtcctggaaagctacaggcagatgagttaaggttaagacaaaaggggactgggagggtcttactgaccgtgtagttgttttaaggcagtttctagactttgtaatatgttataaagttaatttctgttaaaaaatttgaattctagacccaggcacggtggttcatgcctgtaatccctgcactttgggaggccaaggtgggcggatcacctgaggtcaggagtttgagaccagcctgaccaatatagtgaaaccccatctctactaaaaatacaaaaattaactgggcgtggtgatgggtgcctataatccagctattctggaggctgagacaggagaaatggttgaacccaggagtcggaggttgcagtgagccgataacggtcccactgcactccagactgggtgacagtgagactccatttaaaaaaaaaaaaaaaaaattgaattctagagcccggcatggtggctcatgtctgtaatcccagcactttgtgaggctgaggcgggcataccacctgatgtcaggagttcgagaccagcctgaccaatatggtgaaaccccgtctctactaaaaatacaaaaataatccaggcgtagagatgtgcacctgtagccccagtgacttaggagcctgagacaggagaaatgtttgaacccgggagatggaggttgcagtgagccgagatcatgccactgcactctagtctgggcaatagagcgagaatccgtctcaaaaaaaaaaaaagaattcaaaaagagcattgcaacaggaggaataccaattataaaaattttaaggaatgcaattttaggtagacaagggctttttttcatagagtggagcctacaagattagaaagaatggaggagaatggcaaacggggggttaaaaaatcagatttcagatcagagaatgttttatcctgaagtcagcatgttcttaggagggatatagaatgaaattgtataatggctcagattgagggtagctcaaagttcagtagcctgtgaaaaattttatttagaccactgaagacaaatacagctgactcttttaataagaaaaagaagaaaaggtgccaagtttttaccaaaaaagggtcccaatccaaaccccaagagagggtccttggatttcattctagaaaagaattctgggtaagttcattgaataaaatgaaaggaagtttattaagaaagtaaagaaataagagaattgcttactccataggcagagcagtccggaggcctactggttgcccattttatggttctttcttttttttttttttttttttttgagagggagtcttgctctgttgtgaggctggagtgcagtggcatgatctcgactcatggcaacttctgccttctgggttcaagtgattctcctgcctcagcctcctgagtgactgggactacaggcatccaccaccatacccagctaatttttttttttttttttttttttttttagtagagacagggtttcaccgtgatggccaggatggtctccatctcttgacctcatgatccacccaccttggcctcccaaagtgctgggattacaggcatgagccactgcacccagccagttatttcttgattatatgctaaacaaggggtggattatttattcccattgtagaccatatagggtaacttcctgatgtttccatggcatttgtaaactgtcatggcactggtgggagtgtagcagtgaggatgagcagaggtcacactcattgccatcttggttttgttgggttttatcctgctccttactgcaagctgttttgccagccaggtctttatgacctgtatcctgtgctgacttcctatcttatcctgtgacttagaatgcctaaccatctgggaattcagcccagtaggtttcagccctattttacccaccccctattcaaaatggatttgccctggttcaatatgcctgacatttcctccctcttttgtacaaaaaaaccccttaatcataagggttacagaggaatgaaaattcatcttctgtaactacttcatgctgtataggggcgatgatattcttgcttaactattagagtcttttgtatttgaggtagagaggagctcaatcggaactcatcagtatgtgagggccattcataactgttgagtttcaaaaaaggggttatctcaaagattagtaagtgtttaatttaagaaaacatctaggctgggcgtggtagctcatgcctgtaatccaagcactctgagaagcctaggcgggtggatcgcttgaggtcaggagttcaagaccagcctgaccaaatgacgaaaccctgtctctaccaaaaatacaaaaaattagccaggcatggtagggcgcgcctataatcccaggtactcaggaggctgaggcaggagaatcgcttgaacctgggaggcagaagttgcagtgagccaagatcgcgccactgcactctagtctgggtgacagagggagactccatctcaaaaaaaaaaaagaataggaaacatccagaaagtttatcctgcatttctacacacagagtacaactgcaatatattttacaagttcaggcagccgcttcttggtagcaaaagggtcgtttccagaagtcctgtcagctctcaagtttccccttttggaggggaaagagctccccatgtcctaattctgtcactcatagacaccagcaaacagtgcaagacagattaatccaaaaagaatagcaattaacatccagtggtgtgaaaccagttcttagttgagactttactgagagcggtctctaacctacatcttaggaaggactataaccttcctaagttgggtcttgaatccaagtacagtcaagcatccttgccttgttttagaggctcctttaacccacgctgtcttaggagagactctgactttcctaagttgtgcctccaacctaatctcatcctttacccaggtatatggactcaaagtcagccaattggtatccacagataatttttctgggggagggacagaagtctcttcagtatagtccttttgtggttgccaggaaaatgttactagaaagaagtcttgatccataccccaagagagggttcttgtatcttgctcaagaaagaattcagggcaagtcataaagtgaaagcaaatttattgagaaagtaaagaaataaaagaaatggctttctccataggctggttgcacatttttatgtttactttttaattatatgctaaataaaaggtggattatttatatatctcctttttagacctttacgatgtaacatcctgatgttgccatggcatttgtaacctctcatggcactggtgggagggtaacggagaatgaccagaggtcactctcatcaccatcttggttttggtggcttttatcccacttctttactgcaagctattttatcagccagatctttgtgacctgtatcttgtgctgacctcctatctcatcttgtgacttagaatacctaaccatctggaaatgcagcctggtaggtctcatccttattttactcagcccctattcaaaatggatgctgtgtacctctgacagattctgtgtctggatgtgtaataaataaggaaagagagcaccatctaagtcataatgggaagggtatttctttctataaactgttcctgaagaacacaaaggatgaagaattttattaatcacagctatttactagggttatgtatgtgtttcatctttctacatctttttttgtcctatacatttcttctatttgactttcctcagttgtatattttataataaactggtaaacataactacagtgtttttctgagttctgtgagtagctcgatcagataattgaacttgagaaagggctcaggagtccccagtttttaaacagtagctcagacacatagatgggcctatggggtttgtgactggcatctgcagtgaggacaatgttgtgagactgagccctgaatcagggtctgtgctgactctgggtggtgtcagaattcaaatgttagacattgagttggtgttagagaattgcttgatgttcagcaaatgctacagatttggtgccagaagaaagatatcacagacgcctggcctgcagtggaactccaggtgtctgaaaatggaaggctctgctctcctgtacacagactgtcatactgcccattgtcctgtgattccaggtctcctcttagggtgagagaatgaaaactcagaggaaaggagatctaatgacagaccctctgtctcacagctgccaccacaggattcccacccactcacaaacacacccactagacattgatgtgtccacactcctcccaggactaggcaccaccatcaggaacttcaccacagcatatttgatcctagggtttcttgccaaaaagacgcaaaagtgtctacaactctcctggcatatccccactgtatctgcagcagtaacctgttttctccatctacctagcattatggagcacctgttcataatctcatctgcctgcatggacacagaaataaatcagagtacagccccactgggaccactatctgcagaacaaacagttctttccagttatattgcactcttctgcacgcatgggtttttcttaacttttctttttggttcaggcatacacgtgcaggtttgttatataggtaaaattgtgtcatgggggtttgttgtagattattttgtcagtgagttcctaaacatagcaccaaagaggtatttttttctgatcctctttgtccttttatccttcatcctcaactaggcctccatgactgttccttctttatgtccatgtgttcttattatttagctcttccttataaatggtgacatgcatttggttttctgttttgcgttaattttctaagaataatggtctccagctccatccatattgctgcaaaggacttaatcttggtgttttttgtttgtttgcttgttttttgagacaaactctttttttttcttttttttgagacgtagttctgctcttgttgtccaggctggagtgcaatggtgctatctcggctcactgcaacctcagcctcccaggttcaaacaattctgcctcagccacccgagtagctgggactacaggtgcatgccaccaagccctgctaatttttgtatttttagtagagatggggtttcaccatgttgctcaggatggtcttgatttcctgaccttgtgatctgcccacatcagcctcccaaagtgctgggattacagacagaagccaaagcgcccagccagacaaattcttactctgttgctcaggctggagtacaatggtgtgatctctgcttactgcaacctccacctcccaagttcaagtgattctcctgcctcagcctcccgagtagctgggattacagatacttgccacgacgcccagctgattttttgtatttttagtagacacggggttttagtatattggccaggctggtcttgaactcctgatctcaagtaatccatctgcgtcagcctcccaaagtgttgggattataggcatgagccacagtgcctggctttgtgtttttatatggccacatggtcttccttgatttttatgtaccatattttattttgattaaatctttattttatttttggagacagtgtctcactctgtcacataggatggaatgcagtggtgtgatcttggctcacttcagcctcaacctccaaggctcaaggtttaaggaatcctcctacctcagccccttaagtaactggaactataggctcacaccatcacgcctaatttttctttttttattttttgtagagatacggctttgccatgttgcccaggctggtctttaactcttgagctaaggcattccacctgccttaatctcctaaagtgctggcattacaagcgtgagccacctcatgctaccatattatattttttcaatctagtctaccatcaataggcaattaggtttattccgtgtctttgttattgtggacagtggtgaaatgaacatgcatgttttaagttttgcatttaagtcttcaattcaggttgagttgatttttatatatagtgtaaggaaggggaccagtttcaatcttctacatagtgctagctagttattccagcaccatttattaaatacagaattcttttcatattcctgtcaggtttgtcaaagatcagatggttggaggtgtgtggcattatttctgggctctctattctgttgcattgttctatgagtctgtttttatgccagtataatgctgctttggttactgtaatgtagtttgaagaggggcaatgtaatgcttccagcttcattctttttttttttttttgagacatagtctcgcactctctcacaggctggagtgctatggcatgatctcagcttactgcaacctccacctcctggattcaagtgattctcctgcctcgccctcctgagtagctgggattacaagcacacaccaccatgcctggctaattttcgtatttttagtagagattgggttttaccatgttggtcacactggtcttgaactcctgacctcatgatccgccaacctcggcctcccaaagtgctgggattacaggtgtgagccaccatgcccataatggttgaaagctttttaaacatctattgaaatgactttgtggtttttatctttaattgtgtttacatgatgagtaacatttattaattgtatgttgaaccaaccttttatttcagagatacagccaagttgatcatagtgcattagctttttgatgttctcctggatttggtttgccagtattttgttgatattttcatcaatgttcattaaaaatattggcctcaagttttctattttttgttttatatttgccagattttggtatcagaataatgctatttttatagaataagttggaaagaagtccccttttctcaatcttttgaaataatattagtagaagtggtaccaactctaatttttacatctggtggaattcagctgtaaatttttctgattctttgttgtttttggtgggtaggctatttatttctaattcaattttggagctcgttattggtatattcagggattcaatttcttatttgttcagtctttggaggatgtatctttgctccaagtttacaatcctcaagcttggcccagatgaagtctctacttatattcatgttgcctcagtttttttcttttaggtagacatattacttagaatgtgctagagcagcctctatgaagggatctcttctttgactgtactcggcttgctgtaatgcccaaggatgcagagtcaggctaacctcacctagaacctgcacataagttctggcctctgcctgggatttacaagacagggccagactttgggttgagaatgtactgaaaaccaacaaaaggcattttctgtattgtgagatgtcagtgtagaaatcttaaagcccccatttgagaatgtggctctttaagcttttcaatcttgttcagtgacctgctacagtatgtgagaggctcctggtgtaaatagaatctgatgatagaatctgtaagtgtaaacaagaatgagagatcaaggccacaaagtatccagagccataaccacaactatacctaccggtaattgtgatattggagtaaagtattctcgtccttcttcttacccaaaagctagcaaaaatcaggataggtgacccaggttctggggctccaccaaggcagttccattttctatttagaatcagcctgagtttctccagcctggcttatcactgggccatcagccctgggtcactgggaatcctctcctaatcacctgggtgtccttaagacatttgaggatgtcaagggtagaattatgtcaggctaacaagaatgattaattatgtttctgtctcgttgtaagagaaaggagacatcctgtgtttttttctccctcatacaagagataactttggttgttacccagatgagagtttctcaagttttctggtactagggtgaaagacaaagaggaggtctggtgactcaaacaaactaattgcttccacttcatatggtcattcaaaaaatagatgaagcagtcaaggtccctaccatccaggaaattttagtctagactagcaactggatacatggttgaattaagcattatatggttggtacagtgaatagaagtgtgcaaaaaaaccttggtccacttctttttaatattgttgtgacttctgaagttatcacctgaacgtatatttatggactgaagagttattattatttgtgtttcttttacttttctaagaatacatatttatcttctaataaaattatcctagaaaactttaaaagatccatttaaattgcttattagtatatgttataaaattgacagcagtggcaaaaatagattagtgttacataaactctgggatttaactttttttttcttttttcttttttagacggagtttcgctcttgttgcccaggctggagtgcaatggcgcgatctcagctcacctcaacctccgcctcccgggttcaagcgattctcctgcctcagccttccgagtagctgggattacaggcatgcaccaccaccctggctaattttgtatttttagtagagatggggtttctccatgttggtcaggctggtcttgaactcccgacctcaggtgacctacctacctcgacctcccaaaatgctgggattacaggcatgagccaccgtgccaggctgggatttaagtttttcttaggtaaacttaggaaaaacagaactggaaatactccagtgacatagaaaacaaattctacctaggttcttttccctgccccagttctgatcagattcaccatttttggaggccttatttaggtctggcctcactctggagtgttcccttacaaaactgatttataaagattcaagtttttgggggtaaatcctgctgactttctagagctgctgctcacagtatcctgaaacccaaaagcagatacataagaaaaataaactatacattttaagatcttaatttttaaattttgtagtaaaaccagtgcttacagaaacgttccatttagcagattttctgttcctgcagatccagtagctgctctacaagtcataaacaagtaaacataaacacaaaaaaatttctctaaactacattctaaatcctgagaattattgaacacttagtatgaactttcaaggtgttagtaggacataataacaaataataacacataatgtgttattcccagcacagtgctctgcaacatactattgagcacatagtacctgcttaataaacattgcattagttcatgtgtacatgttgttttttaaatgcagacttatttagacattgctgccttctgtgtcctctgtaaactttagagagccagcaaagaatatgaaactttacattttttgtctttatttgggtatcagaagtattgtattgtgacaagagtgcggcatgtaaaggactctgtgctgtgcctgctttctctaactaatgctaataatgagcccaaggggagcaacatcagcattgacacgggacttgtttgaaacacccatccatggaccctttccaaacctacagaatcacattacataaagtgggaccaacgttaccaagtgatttttgagctcattaaaggttgagaggcaatgcttagctaagtggttatcagcctagacttctcattagcattacatggccaatttgcagaaatctctttacttgtaccctttccacaggttctgtttattgttctaggtgaaagtattcatgttgttttaattgtgtctcatgtgactctaaggtgaggccagaatcaagtgtgtggggttcaagatacattcatgagagttaagttccacctttgcactaaaaggtagtcacagggaccgttctgtttggttttgatagggagaggtcagtgtcacccatatttccattactgtagcagaaattgctggtgtttgtggcaaaagcaggcacctgaagacagaaatagagaaacatatttttatattcattgagcagttcattgttcctgaatctctgctgttataaaggacagaaatgggtgtgctttttctgcagttcttagttcttttttctgtgggtgtgagactagcaggtaaacaggtggtgctgacgccttttaaggaattttttcaagacacaggtgtaacttctccagagaatgtcatctgaaaagcatttccaaagaagacaaaagaggaaaaatggctttttttttttttttcagctaaacatgtgtcagatgaagagctgtgtccactctgcctcctggagtgcgatgcatttagtccttgcaaacatttacttctctacttgtgtttctttcccctaatgagtttaactactataaaaaattcttgtggtagtcaagggtctctgcaaagtatctctctcctatatcccagagccttctctacactctctaaatcatggcttcttatacgccatgcagaattcttaccaggaatttttgatctgcactattaaaagtgtttcccttgttgctgttgaacgtggaaagatgtggatactcaagattcctattgggggaacgtccttagtaaggatggagaacatgtaatgttgaggtttcatatgtgttcttcattagctctgttcagaacaggattaagaaaatgcttatttaaactggatggcatttattactctgaaagttctgaaaaaaaaattattgcgagatacccgctttctagggtgctaaagaaagactactttaaattgttattaaaaattacagaacatagaagatatctgcatcttgaactctgcataaaactgatttttctgtgtggttaaattcagactatactttttggggggcaatatctcagtaatgatgctgtgttcttcggtgtgcgtcagcacatcacaaaaatttgtccttgtgcagttgattttaaaatttacttcaagagctcttggaaatattcatttcactgtagagttaattatttttctcctcattattaagtatctttatgtagccaaagaagagctgtgcataaatcatcacatttaatctggcagctgcctttctttcttaggttttctttgcatatgtctatctttagaaaatgaagactcttatctttgtttacaggccagaaaaatggggtaaaacacaggctcttccacttactggatgtttgacaaaatgttctttttgggcgaaatacattggcattactagtgagcttgttagaaattcagaatctcagactttatttcacatcttctgaaaaaaaaaaatctgcataagatctccagtgtattgtacacattaaaacttgagaggtgctgtctaactcaacatgtcatttttgcctaaaaaatatgcactactcattctttgtgatgcaaatataacactaaaaaatatacatgtttgtgttcatgcctttcgtttttatactttattgttcataaaattatcatatatacagcggtattgtggatcttataccattctcttctctcagagttagagaatacattagagaatatttctgtgttgaaaattgttggatgatttcagttattcctgtaagtcagaaccaattttctttactctctcatttaaccttaattcaaatgataaattctgcccgtggacacttgtaaatatgtgtgtgtgtgtgtgtttttcaggggccgttgacatttagggatgtggtcatagaattctctcaggaggagtggcaatgcctggacactgctcagcaagatttgtataggaaagtgatgttagagaacttcagaaacctggtgttcttgggtgagaataactttaatacacaattccttatatacactaaaggtttcatttctccatttttgtagaataatttttggtagtttatgctttgcataaatgcgtttctgatccctgttttcaaaaaattgcgaggaattatccatgcagaaaaaaatttcctcaagatgttttatcttagcctgaactttttgcattcctgagctggtctgtacccttcactctagagtagtggtaatctcagaaatttagtagtataaaatattgttgcccataggttaaaatctatttgccaccactaatttttgattcatgagcactgagtagcaaaattaaggacctacaaatttaaaatattttctaaatgtaagaactttctgtcattaaatagtattttgggatgaattttctagaatattctattacctcctctttactaagcacagtaataggtaggtaattagagaatatgagcaagattcatgttatttatttttaataaatcaggtattgatgtctctaagccagatctgatcacctgtctggagcaaggaaaagatccctggaatatgaagagacacagtatggtagccacacccccaggtaggtgagagtgaataaaacagttgacatagatgaaaggttggaagattacaaaaaaaaaaaagcagtccctataatgtgatttgggaagctgtgttccaaagcaaatagattctgggaagcctgaggtgtgtggtttttttgtttgttttctttttgttgttgttactgtcacatagggccatcttctgtcttaggcttttaaattctctaaggattctactttcccttcattgattttccttcaagttcacagtgagagccagagtcctcttcatggcatataaaagactgcacaatctgactgcatttccattgttttgggggacacacaaatatctgcatgattttgagaaactttatgttaaactatttttttagttctcttttgcatcatgtctaaaatgtgtgagagtagtggtcactgttctattggtttttatgttaattttctgcacattccatctttttttattagtatattcttgaaatatagtctgaaattataaaatataatgtctctctgctttgttctttttcctcaagattgctttggctattcaaagtttattgtagtttttttgttttgttttgttttttgttttgagatggagtttcactcttgttgcccaggttggagtgcaaaggcgccatcttggctcatcgtaacctctgcctccagcgattctcctatgtcagcctcccgagtagctgagactacaggcatgcaccaccatgagagtttttagtaaaaactcatgtttttataaaaagttttattaaaaaattggatttttagtatacttgccttggcctcccaaagtgttgggattacaggcgtgagccactacacccagcctttttttctattttatactttcattccattttggtcataggatgtaattcataaaatgtcaaatttaacaaatttttatgactccgtttttggcctaacaggtggtctatcaaagagaatgttgcataagctattttgaaggatgtgtttcctcatattcttgaggactcttctctatttctctgttaaaaataattgtacaggctgggcgcagtggctcatgcctgtaatcccaacactttgggaggccgaggcgagcggatcatctgagtttgggagtttgagaccagcctgaccaacatggagaaaccccatctctactaaaaatacaaaattagccaggtatggcagcacgtgcctgtagtcctagctactcaggaggcggaggcagaagaatcgcttgaacccaggaggcggaggttgtggtgagctgagatcgtgccattgcactccagcctgggtaacaagagcaaactccatctaaaaaaaaaaaaaattgtattatactgccttcagttcctctcttcacttactaatattctgtcttgttttatttttattacagaaagtggggtattgaaatttcctactataattatattgctgtctaggtgtttcttccagtctgtcaatatttgctttatatatttggaaccttagtgtgacatacacacagacacacagacgtgcacacacacacacacacacacaaaatttgtcataggttcccagttaataaatctattattgtttaatgtctttctttgtctctttgcagttttgacttaaagtactttatgtaagatatgacagtttttgacttaagatgtggcttttgtaatactattttgacctcttctgctctcatttggttaatatttgcatgcaatgtctaaatctatcttgccaccttcagtatgtttttaatcattagatgtcagctgacccttgtagaaaggcaaattggatcttggtttttaataattttaaataaatttctttattgaaagtatgtctcttgattggaaagttttctgaaacaaagagacttactaattttttttgttgttctatttgattcttgcatctttgtcccacattttctctctttgtttctctctgtggctgttttatttttactttgatatgcttttacttctttcttatgttgttttctgtgtctatacaggcatattctttgtggtacgtgggggattacataaaacctttaagagatacaatgtatttcagtctagttaaaaatgaacttttgttgcatgcaaaaattttttctcattacatatgttctcagatttgttcttgatgttgctaattatatttttatatgtatatttattaacatgtttataatgatttctatgcctttatctttcaaattttggggaataattaaaaatttcttctgtgccattatgataatgctaagaaatgtatttttgtgtatgtgcgtatctttcccagaaaataatgtgttttaatatgattttgtgttgctttgttaaatcatcttattttcattggaagcaactgttttcagcaccttttatatgtaaggaagtaccaatatactttttaaaatttggttatttttgaagtttgttttctttttatttagcaggacagatttggtgatggtattatactcacttgataactattttcttcagatttcactatatcacacagttttcttctgtcctgaaaaatttttgttgagaatccactggctatctcataagagtattcttgcaaataatatcactttttttttttttttttttgagatggagtttcactgttgttccccaggccggagtgaaatggcgcgatttcacctcgctgtgtcccaggttcaagcagttctcctacctcagcctcccgagtagctgggattacgggcatatgccaccacacccagctaagtttgtatttttagtagagacagggtttctccatgttggtcaggctagtctcgatctcctgacctcaggtgattcacccacctcagcttcccaaagtgccgggattacaagcttgagctaccgcgcccagccaacacatcacttttatcttgcagctcccgagattctcttttctgtgacttttaaaattgtgcttacatatgtgtttgatataaatatctttgtattctagtttgtttgttcagcttcttcatttttacatcactttttaaaagatttctgttattttttatatttttttacctccataatttctgtttttccaatattttaaatatttctgttcttatttccagttttctgattttctgtagttctctgtgttcatattttactcattgagtattcaatttattttgtttttaaaattaatgtatacattttttatttctttctgaaaaatttataataattttgttggtactacattgccctgttttgtatatattctaatcttttattaaaatttgcacattaaaaaaatgttacctgtcccagtctttgtaatgtggctttctcctggcatactttgaacaattgtctgggttagagattctgagagtctctcagacatattcttacaatgtgtcttgcctgaaattttgtgtttattttttagttaaaggaaattattcatcttctttgttaatactcagtaatcactcactgcacctgttttctttctgtggtcctgcagtctcttcactgctttaacatttacctttgatctcagcagacacaaactgtcattccaaattataccaccatttctttcagcactatatgtcatgggtgacagaaaccagtgtcttcaaaggcccctacaagcaagcaataaagatacatgagccagtattttacttgtgttttttaaatttttttttttaaggccacatttttttaattgacacctcaatctctacatacatacagtattgcacgaattataagtggatcaacaattatattattgatacaaactcatgagcatttacataaaactaccgctctaggttttggtgtgttttgtgccagctactttagtgaataaaagaaacataaaggaactcaactacttgaattcatgagaatcagctttcaataaaagcatatgtgtcatctcatagaatacttaatatgtcaaacccaggaaaatcagtaactaagtaacaaaaggaacacttattaagaaaatttgatgataaaaatgttaggctaaaatattaagaactttagcaactggactgaggaaccagaaagtatatgcacactgggaattttaagaaaagatccccatattctcctgcacaatgaggaccacattccaaaaacataattctgggttgttacaatgtcttctctgctacaaaccatagtttcaaagatgaaagaaacaagttcacataaaagggttttaaaattcttcccactcaaaataaaataaaaataatatgatctccatcaaattataaagaaattctatcaaaatggtgaccaaataaagaagtcagaccatttgccttcactgactgcctcagagggcagagcatgtgtcacctacaaggaaggggagatgggggtagagtccccactctcccctggcctgtggagtgggggtggacaggagccctttggcttccctggggttttgcttcctcacatagggaattgagggaggtgggctagatggctttaagagacccctcaactaaaagaatcaaagtcagcttgagatcctatctctgagcaggcacataaggtggcaaaagaaatggattaaaaaacagatggatgatgtctttctcaccttttaataccatcactgagaactaatctgtactatagttgaagaaaatctttgcccggtactattatagggtactcaatgaggcatctgacaatgaaatttttcatacaaatgtataaaaaggctatattaagtttgggtgggaaaacaatgcaccaccatgttactaccagcagtcaggacgtcctgtctcagattttaggagtcaccgatctgtttgggagaaatgctgagggggatgcatgttcaagccattcagtagagagctaaggagggcacactgttcaggaaatggataaacaggtgcccaggaaggcaactttaatgaaactgtttctaaaacaaaggatataagagacctaaatgatccaaggagagtgatggcttctcattttctgtcccctaatgagaatacaaatatttcttctgggatctaacacactagcttcattttcaagatgcatcactttattttccttacaaggcagcagcacattaagcacgtgagagtcacatgatttctgcagtgagcaccaaggcttccaggagttttcttggaacctacagccagaagagtcctgagatttcaaatattaaagctttctctacagccacacgtccctttgatgtttgggttattgaacacaaactcactggataatttgtcttcaacatagtccatttccgctcctaaaactgttagctttgctttctttttgatgaatactctgactccatcttgaataacttcttcatcagaatctccttttgtctttgtatattctagagtataagaaaggccattacagaccctggtttggacaccaacttttacacctacaagctcaggcttacctttttctttttctttttttttcgagatggagtctcattctgtcacccaggctgcagtgcagtggcgtgatctcagctcactgcaagctccgtctcccgggttcacgccatactcctgcctcagcatcccgagtagctgggactacaggcacctgccaccatgcctggctgattttttgtatttttagtagagatggggtttcactgcgttagccaggatggtctcgatctcctgacctcgtgatccacccacctcggcctcccaaagtgctgggattacaagcgtgagccaccgcgcctggccaggcttatctttaagaagttgttttactttggttactgctgaaggtgtcagggtgagggcggcctgggtgggctgcagcttcctcttgctcacagcctggacagttgcctggactaaggaagctgacatcttcaccatcccaatgccccagtgcctcaggccagagctcggctgcctcagcctgtctccatggacatggcaggtgcattctacttgtgttttttaaaatacatatataaaatgttggcaatttacttctttttttctttctttctttttttttttttttttgagatgtagtcttgctctgttgcccaggctagagtgcaatggtgtgattttgactcactgctacctctgcctcctgggttcaagcaattctcctgcctcagcctcttgagtagctgggattacaggttgagccaccacgcccggctggcaatttacttctttttgtttttttttttgagatggactcttgcactgtcacccaggctggagtgcaatggcatgatttctgctcactgcaacctctgtttcctgggttcaaacaattctgcctcagccttctgagtatctgggactacaggcacacaccaccatgcccagctaatttttatatttgtagtagagacggagtttcacagtgttggccaggatggtctcaatctcctgacctcatgatccacatgcttcagcctcccaaagtgctgggattacaggtgtgagccaccacatctggggcaatttacttctaaaggcattatgttatatcggggagcaggaacagctgtgttgggtaagtgtaacaaacttttttttcttctgtgtgactttttgcattgtgctcacttggggtactttaaacatttagttcatttataattttttctcagatgtattttcgttagtatgtttttgttacatatatatgtctataaaaaattagggcctttggtattttgctatatcatcttgtatatgtagtttgtataatgtcatagtttagatttgtaatctatatttatctgagtctagtaagtggagtaacttgatatttttatttctttcagttacatattctcattttgcccaggacctttggccacagccgggcataaaagattctttccaaaaagtgatactgagagaatatggaaattatggacataaagatttacagttaagaaaaggctgtaaaagtgtgaatgagtgtaatgtgcaaaaagaaggttataatgaactaaaagagtatttgacaactacccagagcaaaatatttcaatgtgataaatatgtgaaagtctttcataaatttttaaattcaaatacacataagacaagacatactggaaagaaacctttcaaatgtaaaaaatgtggcaaatcattttgcatgcttttacacctaggtcaacataaaataattcatattagagagaattcttaccaatgtgaagaatgtggcaaagcctttaaatggttctcaacccttactagacacaagagaattcatactggagacaaatcctacaaacatgaagaatgtggaaaaggttttaaccactccacaactcttactagacataaggtaattcatgctggagagaaacactacaaatgtgaaaaatgtggcaaagattttaaacagtcctcacaccttactaaacataagacaattcatgctggagagaaaccctacaaatgtgaaggatgtggcaaagctttctgccaattctcataccttactaaacataagataattcatactggagagaaaccctacaaatgtgaggaatgtggcaaagcttttaattggtactcacaccttaccagacataagataattcatactggagagaaaccctacaaatgtgaataatgtggcaaagcctttaatgtattcgcaacccttactagacataagataattcatactgaagagaaaccctacaaatgtgaggaatgtggcaaagcttttaaacagtcctcaaaccttactactcatgaaaattcattctggagagaaaccctacaaatgtggagaatgtggcaaagctttcttcagattctcataccttactacacataagataattcatactggagagaaaccctacaaatgtgaagaatgtggcaaagcttttaactgttactcctaccttactgcacataagttgattcatactggagagaaaccctacaaatgtgaagaatgtggcaaagctttctaccgattcatttaccttactacacataagagaattcacactggagagaaaccctacaaatgtgaagaatgtggcaaagctttctaccgattatcttatcttactacacataagatgattcatactgtagagaaacgctacaaatgtgaggaatgtggcaaagcttttaactggtactcacgccttactacacataagagaattcatactggtgagaaaccctacaaatgtgaagaatgtggcaaagcctttagtgtattctcaacccttactaaacataagataattcatactggagagagaccctacaagtgtgaagaatgtggcaaagcctttaatgtattctcaacccttactaaacataagagaattcataatggagagaaaccctacaaatgtttagaatgtggcaaagatttctaccaattctcataccttactacacataagatgattcatactggagagagaccctacaaacatgaagaaagtggcaaagcttttaactgttcctcacaaattactagacataagataattcatactggagagaaaccctacaaatgtgaagaatgtggcaaagctttttaaaaatcctcaaaccttactaatcataagataactcatactggagagaaaccctacaaatgtgaagaatgtggaaaagcttttaaccagtcctcaactcttactagacataagagagttcatactggagagaaaccctacaaatgtgaagaatgtggcaaagcttataactggtcctcaaaccttactaaacataagaaaattcatactggagagacaccctacaaatgtgaagaatgtggcaaagcttttaaccaatcttcaacccttactatacataagataattcatattggagaataacactacaaatgtaaaaaatgtggcaaaccttataaccagtactcatactttactacacataggagaattcatgcggaagagaatttctacaaatgtgaagaatgtggcaaaggctttgactggtcctctacccttactaaagataaaagagtttgactgggtgcggtggctcatgcctgtaatcccagcactttgggaggctgaggcaggcagatcacctggtcaatggtcctctacccttactaaagataaaagagtttgactgggtgcggtggctcatgcctgtaatcccagcactttgggaggctgaggcaggcagatcacctggtcaagagttcaagaccagcctggcccatatggtgaaaccccatctctactaaaaatataaaaaattagccaggtgtagtggtgcacacctgtagtcccagctactctggaggcctaggtgggagaatcgcttgaacccaggaggtggaggttgcagtgagctgagatggctccactgcactccagcctggatgacagagagagactctatctccaaaaaaataaataaataaataaaaaaaataagagagttcatactagagagaaaccctgcaaatgtgaagaatgtgagaaagctcttaaccagtcctcacaccttactgcacataagagaaatcatactggaaggaaaccctacaaatgtaaagaatgtgagaaagcttttaactggtactcatgccttactgcacataagataattcatactggagagaaactctacaaatgtcaagaatgtggcaaagcttttaaccggtactcaacccttactacacataaggtaattcatgctggagagataccctacaaatgtgaagaatgtggcaaaggtttttattgattctcatactttactaaaaataaggtgattcattctggagagaaattctacaaatgtgaagaatgtggcaaaggctttaatttgtcctcaacacttactaaacagaattcatagcagagagaaatcctacaaatatgaagaatgtcacaaagcttttaaccacttctcaaccctgatgacacataaggtaattcgtgctggagagaaaccctacaaatatgaagaatatctcaaaactttttatagattctcataccttattaaacataaaatcttacaggagagaaattatacaaatgtgaagaatgtggcaaagcttttaagaaatcctcatccattactaaacaagataatttgtactggagagaaaacctacaaacgtgaggaatgtggcaaagcctttaatggtcccctcaactttctgcacataagataatttatactgtggagaagccttacaaatgtgaaaaatgtagcaaaccttttaactaatcctcaacccttactacacataagataattaatgctggagggaaatcccacccatgtggcaaagcttttaatcaatcctcaaaccttactaaacataagataactcatactggagaaaaatcttagaaatgtgaaggatgtggtaaagccgttatccagtcctcaactcccactaaacataacataattcatactggagagaaacctcacaactgtgaagaatgtggcaaagcttttaaccagtcctacaaacctttttgaacaaaataattcatacaggagagaaacactacaaatgtgaggaatgtgacaaagcctttaaccagtcctcaattcttaccaaacataagaaaattcatattggagattaaccttatgagtgtgaaaaatatggcaaaagctttaactagttctcagttattattattatttttagagatggagtttcactcttgttgccaaggctgcaatactgtggcatgatttcagctcactgcaacctccgtctcccaggtttaagcaattctgcctcagcctcccgagtagctgggattacaggcatgcaccactatacccatctaattttgtatgtttagcagagatggggtttctccatgtagatcaggctggtcttgaactcctgaccttgtaatctgcccacctcagcctcccaaagtgctgggattacaggcatgagccaccacgctcagccactagtcctcagatcttaacacacataagataattcatactggaaagaaactccacaaaccagaaagatgcaataatgcttttgacaacacctcaagcttttctaaccataaaaagaatcatattggtgagaaatcctagaaatgtgaagaatgtgacaaagtctttaaatggttgtcatacttgacttttttctttttttgagatgaagtctcactcttgtcccccaggctggtgtgcaatggcatgatgtcggctcactgcaaactccgcctcccaggttcaagtgattctcctacctcagcctcccaagtagctgggattacaggcacctgccaccacgcctggctaatttttgtacttttagtagagatggggtatgaccatcttggccaggctggtctcaaactcctgacctcaggtgatccgcccacctcgggcctcccaaagtgctgggattacaggcatgagccaccactccctgccttacttgattacattcaatataattcatactggaaagaaatcctacaagtgagagcaatgtggcaaaacttaaccaccttattgcacagaaaagcatttatgtttgagaaaaattatacaaatacagactgtgaaaaagacattaatatctgcttacatcttaacaccagagagttcatacttaataaaagcaagataagggcaattactgtcaaaaggtctttcagaaaaatataaccctttaaagtgaagaagagaatttatattgaagatggacattacaaacataaagagggttgtagtacctttacttgaatcaaattttattgtacacattttgtactagaggaaaactctgaagcagttgctcaagctttgttcaacattagggcacttatattggaaaagtgtcttgcagatataataaatgtggaaaaacactttttcaaaaactacatcagaaaacaccagagtttatactgaagaatatttttgaagatgcactaaaaatgaaaaaatatttaatccaaattagggctatgtaaatatcagaatttataatagaaatatataaggaactgacactgcagatatactaagtcaagagttctgagtatagaaaataatctaaaactaaagttgatagaaaaagtatttgtatataaatttaagaggagtaaaagattttttgcagagtaataactacattctaagtatactttatttcttgaaaaaattacagactttgaaagcaaatgatgtaattcaacactcattttctggtgtttcttcattcttattcacttgtgaaagcatgtgataattgttgcatcaaaggtatgagagattcttttccattaggtgggcatttatgatcttttctatggacaagtaaggacattagaatgtaagatgcatgatgaaaaagtggagaggttctttgtggttaacttatactcttgagtgatatatgaggtaggtgttaagagtattgttcttttgcattatgagaaaactagtagtatattattagtatattattgtactaattgtacttttatataataaaatgcagcacatttttaaaattttacattatgtgtgaagttaatggtttcaacatttttaacatgttaatctcttgccagtggctttaaagtatagataaattaaataataatattcctgttgggtaaatatttattcttattttaatcaattaaatttatttttcttaatttttgtgggtatatgagtatatatacttatgccatatatggcatattttgatacacaaatataatacataataatcatgtgctaaatgtggtatccgtcacctctagcatttatcctttgtattactgacaatcgaattctacacttttacttattttaaaatgtacaattatggccaggcacagtggcctcacacctgttatcacagcactttgggaagctgaggcgggcagatcaccaggtcaggagttcaagaccagcctggccaacatggtaaaaccctgcctctactaaaaatagaaaaattagctgggcatggtggcaggcacctgtaatcccagctactctggaggctgaggcaggagaatcacttgaattcgggaggtggagattgcagtgagccgagatcgtgccgctgcactccagcctgggtcagagagcaagactccatcaaaaagagaaagaaagaaagagagagaggaaggaagggaagaaagaaagaattggtctctactcttatgaaactttcagtataatttcataaaatcctcatgcattcctgagaagtggatacctctgaagtttcctaaagccctactaacccaaagtaaccagtatctgaattttgtattatcatttactttatgcaattttatctataaacaatatacgtttcagtgttgccagatttttggctctagataaattctacaatttttcatctgtgacttgcttttttatttacaattgtttccttctatttttccatgttgctttgcatagctacagttgtccatttcactgctgcatagggtgaatatacatcaatttttaaaccaattctatagccagtggttatttgtgaattccaattactctatattttaccaactcttggaattactagacatattgaggggtgaagccagctggacttcctgggtcaaatggggacttggagaacttttctgtatagctaaaggattgtaaatgcaccagtcagcactctgtaaaaatgcaccaattagcactctatgtctagctaaaggattgcaaacacaccaatcagcactctgtaaaaatgcacccatcagcactctgtgtctagctaaaggattgtaaatgcaccaatcagcactctgtaaaaacccaccaatcagcactctgcgtctagctaaaggattgtaaacacaccaatcagcactctgtaaaatggaccaattggtgctctgtaaaatggcccaatcagcagtacgtgggcagggccaaataagggaataaaagctggccaccaggagccagcagcagcaacctgcttgggtccccttccatgctgtggaagctttgttctttcactcctcactataaatcttgctgctgctcactctttgggtctgcaccacctttaagagctgtaacactcaccacgaatgtccacagcttcattcttgaagtcacctagaccacaaacccaccagaaggaagaaactctggacacattggaaggaacaaactccagacacaccatctttaagagctgtaacactcactgcaaaggtctgcggcttcattcttgaagtcagcgagaccaagaatccaccagatggaataaattctgggcacaatattttttgacaaagtggagaatcagaatggtatatcatttatagttttaattagcatttctatagttactaatgaagttagcatttttagaagttaattggtcaattgtgctttaagatgtgccatctgtctatttttaatgtatttcatttctttttgtattcatactctataaggtatattgtctaaatactaattttttgtaatatgcgtttttgtagatttttgtcctagttatgatttgcctttccaccatctatatttaaacatgtttttataagttcttaatcaaaaattcttagaatttggtctaatttataatgtgccatgtttaagacattgttttaccccactgttataacaacaataatatcctgtattttctcctaaaagttttaaattctcaatctatgtgaaaaattgttgtgtcagttgctgtgcaggaatccaatctacccagctagaaccaattgtttaggtactagcttattgacttgttctactttgccagtattactgtaatactgagctctcattttaatctattggctgggaccatagatgcaatatttaataaaaatgttgatagcagcatccttataatgtttatgacatcaaaagacaagttttcatggtttatcatgtacatttgctgtagtacattttagataccttctatatttagaaaataaaatttccttttatttttagtttgctaaaaggtttttaccaagccctttttctgtgcctattgtatatacacatatagattttacaaagtttaacttaccttgtactctcgagataaacttattcatggttttacttttttttttttttttttttgagatggagtctcgctctgtcatccaggctggagtgcagtggtgcaatcttgtcttactgcaacctctgcctcctcctgggttcaagtgattctcctgcctcagcctcccgagtagctgggactacaggtgtgtgccaccatgcctggttaatttttatatttttagtagagacggaatttcaccatattggccagactggtcttgaactcctgacctcatgatccacccaactcggcctcccaaagtactgggattataggcgtgagccaccgctcccagccgggtttacttattttatacagagcaagattcagtttgttagcaaatgctttaaaactttaaaatctgtctttatgaatgatacttttatagttattcatgttttgtctctgtcaatctttggtattaactctcagaaattgagttgtgcagtgtttttacttcttctgttttttgaaaggttaaataatatcaacagtatgcttttcatttttaaactttaaatgtctgaaagacttacctgtagagttttctgacattgacattttttgcatatgtgttaatttcatctgctctcatctagtttactagttctgtctagtgcacctaagttcaaatgtggttagtgagttcttttagttattgtattattcattccacaacttagttactttttaaattgttttatagtttctaatgccctgtagatactttcatttgtcttatttaaatatgttaagcctagtagtttttaatatttttgtcgataaatctaatattggatgtctttgcaggtttgtttctgttattccttcttctggtgtctttcacactgtcttctttattgtgagttttgccatctttggttgcttgctagtcactgttcatagaaaattactttcaagtttcatcaaggactggatgagatgttaccttctttaagaaagtttgcttttgcttctttcagttttctgaaaattttacaatgtggaacaatcatttggacaactttaagtaatgtggttcattcaaaatttatataactgatggagaaatttatgtaagatcaatgtgtggtgacaagattgtagaaatttctttctcttttgaaaatttttctttatcacctgccctcaacctcaagacaatcttgtatgccattcctcagtgttgggaagaaagggactgtttgggtcatacctagcctttgaactcccaggttaattttgagaaggtttttaaataatttccaagtgctaaacatccaaaagtacataataaatattaggtaacatcattatactagtaatcctgaacacaatattttaagtgttcagctgcactattgtgttctatgaaaagaaggtttttgtttagaatattttccaatagattgattacgtgttataaattgcaaatatgtttgtagtttgtataaggcaaagaatgagatgtttggattcaaggatgcataagatcaaacactaagacaattttctatgtagttgaggagaaagagtgggtgttgaaaaagccaatgcagctcatggattgcaagtttctgcctcctgctcccacctaatctggctgtgcctggctgccagcagccaagatttgctttaaaatactgaagaaaaagtattaagaaagccaaccccatagtctgtttacatacacaaatataaagcaatgttcttctctaatgtgaggaatatgttcaggaaagctaaaatgatttcagagtaagaaagtaaaaagttggcagcatgagcacatctagccctacatactgagttgcttttggagtgaagagctaacatgaaaggcaagagaaaaattagaaaataataattttgccattgagtactttatattttttatatttccatgaattccataaataacaaaattgtatgaatgcattttttctgtaaacattattttggatatagtgtctgactctgttgccccggatggagtgcagtggtgagtttacagctcactgcagcctcgatatacagtgctcaagtgggtctttcacctcagcctctcaagtagctgggactacaggtgggtaccaccatgtacagctaatttatttgatttttagttttgataagatctcaatatgttgccaacacttgtcttgaactcctgaactcaaacaatctttccccctcatctttccaaaacaggattacaaacataaacaagcacactttacccatataagtatttttaaatattacagacagcactttgggaggctaagacaggaagattgcttgaacaaaagagtgtaagatctgcctgggcaatgtagcaatacctcatccctacaaaatgaaacaacaacaacaaagagaatgctggtatcatgtgaaaatcactacactcaacctcagtgcccttttgcagacaaactctatataagtttgttttatctttacaaagatttgcatgtgtatgtgtgattttatgtacctttcgaagtagtattgcatgtgtgtttccttgggtgagatagtgtgtttgatggttataagagcaggctcaaagtacctgtaaaaccttgggcaagttgtttttgtttgtttgtttgtttgttgtttgtttgtttgtttttgtttttgaaatggagtcttgctgtgttgcccaggctggagtgcaatggtgcaatctcgattcactgcaacctctgcctcctgggttcaagcaattctcctgcctcagcttcccaagtagctgggattacaggtgccttccaccacaccaggctaatttttgtatttttagtagagacggggtttcaccatgttggccaggctggtctcgaactcccgacctcagatgatctgccctccttggcctcccaaagtcctgggattacaggcctgagccacctctcctggccgggcaaacttcttaacctctctgtctcatctatcacttgggaataataacatggccagtaaaatcagtgttgttctttgaacatattaataaagtagaaaaagttattttaagagcaataaaaatattaaacacaaaagaggatatttatagataaagtcaagattttaaaatgatattgtagggaggctgaggcaggagaatggcgtgaacccgggaggcagagcttgcagtgagccaagatcacaccactgcactccagcctgggcacacagcgagactccgtctcaaaaaaaaaaaaaaaaaaaaagtttgcctttaatctattttcttcatgtctaaacatgaaagctcaaggctgtggacaaatttgaagacatggagttttcttctcatgtagccctatcatttttttgttttgttttgttttaagacagagtcttgctctgttgcccaggctggagtgtagtggcgcgatctcggctccgcctcccagattctagtgattctcctgcctcagcctcctgagtagcttgggattaaagtcacccaccaccgtgcacggctaatttttgtatttttagtagagatggggtttcaccatattggccaggctggtctcgaactcctgaccttgtggtctgcccatctcagcctcccaaagtgctgggattacagcctcccaaagtgctgggattacaggcgtgagctaccatgcccaggcttttttttttttttttttttttttttttttgagacggagtcccgctctgtcacccaggctggagtgcagtggcaagatctgggctcactgcaaattctgtctcccagattctagcgattctcctgcctcagcctcctgagtagcttgggattaaagtcacccaccaccatgcacggctaatttttgtatttttaataaagatggggtttcaccatattggccaggctggtctcgaactcctgatcttgtgatctgcccacctcagcctcccaaagtgctgggattacaggcgacagctaccgtgcccaggctttttttttttttttttttttgagacggagtcccgctctgttgcccaggctggaatacagtggcaagatctgggctcactgcaaattctgcctcccaggtttaagtgattctcctgcctcggcctcctgagtagctgggattacaggcatacgccaccacgcccagccagtgtatatatttttagtagagaccgggtttcaccatgttgtccatgctggtctcgaactcttgacctcaagtgatccgcccacctcggtctcccagagtgctgggattataggcgtgagccaccgcgcctggtggccctatcattctttgttcactgtatgatctttagaagaaaggtgggcaacaggtggccagcagtggtctacctgtggtgattttattcttgatatcttctgacctttctatggccactatctgttccaccctcggaacagcacagagactttggtagagagaggctgtcccctcaccactggcagaatatggacgttcagacccttcaccttcctgacgtcagagctgacacattcaatacaacagctattggccatgtatggccggctactgggtgcctggaatgtcgctgcaatttgctagaaaggtaaaatacagagttagtttcaaagatacagttccaaatatatatatacttcattaatctttacatattgctcacatattacaatgataatattttggatatattgggttaattaaattgttacaatgaatttcacctgtttcttctccttctttttaaaatttttttatttttgagatggagtcttgctctgtttcccagactggagtgcaatggcgtgatcttggctcacctcaacctctgcctcctgggtttaagtgattctcctgcctcagcctctctattagctgggattacaggcacctgccatcatacccagataatttttgtatttttgtagagacggggtttcaccatgttggctaggctggtcttgcactcctgacctcgggtgatccgcctgcctcggcctccccaagtgctgagataacaggcatgggacactacacccggctttcttttctttcacttttattttctttcttctcttctcttcacttttctttcttctttttccttccttccttttccttccttccctctttccttctctctctctctctttcactctttctttctctctctctctttctctcttctttttttttcttgagatggagtttcactcttgttgaccaggctggagtgtgcagtggggcgatctcggctcactgcaacctctgcctccctccacctcccgggttcaagcgattattttgcctcagcctcccgagtagctgggataacaggcgcccaccaccacgcctggttattttttcttatttttagtagggacggggtttcatcatgttggccaggctggtctcaaactcctgacctcaggcgatccacccgcctcggcctcccaaagtgctgggattacaggcgtgagccactgcgcccggcccttctttatttttaaagtctggctactagaaaatttaaaattcacatgtggctcacatcttatttcataagattggctccttttaaaaatctcaggctgctagttcaaaggactaggagccaggaaggtcataaaagctgaaattttaaaataattatttttttaaatttgtgaatagccatatattatttataagtgcttatgaccttatacacaaggttaagggaaaataccctctaaggtgtgcctggctcagctcagggaggaagccctgcctgaaaaggctgcagcctaggctatcactctttcttcactccgcccagcatttggtcatatcttctgtcactcagggcctgaaggggcgggcccttaaaccgtatccaatcagacacgcagaactgggaaccgtccaattaggcacacatttggagcggcgaggacggcttccgggatgtggctgggccattgtttctctctgctgccggagctccaggtctacccttcactgctctgtgtcctcagcgtgtgtggcttcgtgacctgaagatactgggaaatccatagctaagatgccaggaccccctgaaagcctagacatggtgagagtgctgggtccgacatcacgagagaggggaaggagttgctcggaaccggtgggaagtggctgtggcgggactcaggcctccccgcagtcagctccacaatctgctccctgagttctccttgcccagctcggcctcagtctccttcagccgtaagttggcggctgcgccaacagccggggccccgggcgtcctgtctcttccctgcactgtgactgtgccctgcctggagtcctctctggcagttctgcacccgcagcgccgcgtctttctcagattgtgcggggaccacgggagggtcatcaggggagaatcctgacttggggtgcgggttcatgaatgggaagagctttggtccgtggggttcccagttgctattttctcctattaaaaatttatgggcgtcactgcaaaaatattaaagaatgtaatcaaagagtggttctagaattgtagagcacccagctatggtttgtagtttgtggtctgtgggagaggcttgaaggaaagtcttttataaaatgcatgatgaagaaaccaaatttactaattggttaggtacagttacatggtttcttaatatgtgcgttaaaggtgaaaatttcctggttatgtaatcagagcttaattggcagtttacagttgctgaagcctgaattttgtttctctgaatgtagtaattaaaaataatgcacctgagttagattttttttttaaagtaagaattcagggactagaaatacctcagtctaattgcctgccacttaattattttcacactccacagggaactgattttctgctgtatttttcacctgtgtcccaagcagagtcttggaaccaatcccccatttctccggcctcactctggcttgcagtaagataatttccagtttcctctgacgttcctaaatgccaccttttcctccctaattcacattatcgcctatttgtcttttactgtacttttttataccatattttaattatttttttggcaaagcattaaatggttaaatggtgcatttaaagagatttgttatctgtttgtaaatatttcccatgaaaagaaggcaaataataataccctgacactgcattgtagtaaatctctgtctcttttgctttcatcttgtctaggcacagagatgttaccagaatgtttttgggtcgaagttctcctttggaaaatctatggggtgatgtgtcctcagccaccctttggttttttcctggtcatgggtttcagtactatctggggataaaccaagataactgccatggttatgttagctagagtgtccattggatctcagcttctggtttattttctcccataagatgacctgaggtatggagtgtatcctctcaagggagcaagtggatattctggggctgaggggaatcttccggtgtactcttattttgaaacgggtaaccctttgaaatgttaaaattgccttccctcaaccaggcttccatttcttggagacaaattgctggtcagccaatcagatgctggtaatgaggggaaaacacagaaataatttctgccccctggattctctaagggggcagaaaaatagtgaaattaatatagtaaaagaaaaagagtaaaaaaaaaaaagtgaaaaatttgtggcccaaaaaatagtatcccaaaagacaaacaacaagaacaaaaacaaaactgactccagtgagatggtgtaagagcttgcaaagtaaaacgcaactgggacagtcaccaagaaatactgcagtgtctcctgaatgggtggttcttgagcacacaagtgagcaggagtgggtggaagaatctctcaagttattgaatggcctgacttgaaaggtgagtcagacacatctgttatttatttattttttattttttatttttttatttttatttttttgtctcactctgtcgcccaggctggagtgctgtggcccgatctcggctcgctgaaagctctccctcccgggttcccgccattctcctgcctcagcctcccaagtagctgggactacaggtgcctgacaccatgcccggctaattttttgtgtttttagtagagacagggttccactgtgttaggcaggctggtctcaatctcctgacctcataatccatccgcctcggcctcccaaagtgctgggattacaggtgtgagccaccatgcccggcccacatctgttatttaaccagcactgccactcctggatttgtcaccttgaagagatttgttcacttattttgacctcagttttttagctgtaaattgcattatattagtaggacttgaaaaggtagaaaaatatttacaaagggcataaaagatttgggtttcaaaaaattatatctaatcatatatgtcatttgttaaaaattctcatgtacctttttctttcccagagtgagtttttgaattttctcaggtgtgttttttttatagctgggtgatttcaaacagaatttcaaggcttagcttttagagtgctgccaagaaaaaggagagaaaaaatctccatttcatttttgctgtagaaaatgaatacatttccatgagaaaatgcggtaggtaattggtgagttacgtagattcataaaaacgtaagttcctttttttgcaaggtaaatttttgacagtgaatatctctgttcaaatcctgttatcttgatttgtgagtttcatgctaaatattatgagatgaaacttgatactgcctggaagtgttttcatatgactcattgttaactgcatgatttttagtggaattaatagaataagacatttattttctaaaagaaatagatacttttgcttttcttattaaggtatacaatataagcaacttggccgggcgcggtggctcatgcctgtaatcccagcactttgggagtctgaggcgagtagatcacaaggtcaagagatcaagaccatcctgaccaacatggtgaaaccctgcctctactaaaaatagaaaaattagctgggcatggtggcacgcacctgtagtcccagctacttgggaggctgaggcaggagaatggcttaaacctaagaggttgaggttgtagtgagccaagattgtaccactgtactctggcctggtgacagagagagactccatctcaaaaaaaaaaatgtaagcaccttaaaattttttttcccgtatgtgaacactgtgtttcagtaattttgctgaattttttaaatacttaatttcaaaaaccaagtgagtaactctaacgtgaaaattaaaggttgagcccagtgactcagagctaaggctaatactgagcctgcaaaaggagtttattaaaggcctagttagttttttttctggagagcctcccctgcagatgttccagcctgctcactccagccatggaagaagcctttctgctgacagaagctacagagtcctggaaagctacaggcagatgcagttaaggttaagataaaaggggacagggagggtcatactgaccatgtagttgttattgtacatcagggatgctatgatttagtatcctgaaactttgctgaagttgtttattagtttaaagagcttttctactgagactgtagggttttgaagatacagaatcctgtcatctgcacacaggaatagtttgacttcctctcttcctgtctgaatgccttttatttctctctcttccctgattgttctggccgagactttgaattctatgttgaacaagagttttgagaaaaagcattcttttcttgtgccagttttcatgaaggaatgcttccagcttgtgttcattttgtatgttggctgtaagtttgtcatacttagataactcagtattttgatgtatgtacctccaatgcctagttttttgaaagttttaaacatgaaggatggtaaatttcattgcaagcttttttaacatctactgaaataaccctgtggtttttgtctttagttctgtttacttgaggagtaacatttattaattgcatgttgaaccaaccttttatttcagagatacagccaagttgatcgtagtggattagctttttgatgttctcctggatttggttttccagtattttcttgaggatattttcatcaatgttcattaaaaatattggcctcaaggtttctatttttttgttttatatttgccaaattttcatattagaataatgctgtttttacataatgggttggaaagaagtccctttttctcagtattttgaaataatcttagtaggagtggtaccagctcttactttacatctggtagaattcagctgtaaatttgtgtggttctttgttttatttttggtgggcaggctatttatttatttatttattttattttattttattttttgagacagtctcactctgtcgcccaggctggagtgcagtggcacagtctcagctcactgcaacctccacctcctgagtttaagcaatgctctgcttcagccacctgagtagctggaattacaagtgtgcaccaccacacccagctaatttttgtatttttagtagagatggggtttcaccatgttggccaggctgttcgctgttcttgaacttctgacctcgtgatccactcgcctcggcctcccaaagtgctaggattacaggagtgagccaccatgcccggtcagctatttatttatctacttatttatttatttcattttatttatttatttatttttgagatggagtctcgctctgtcacccaggctggagtgcagtggcacgatctcggctcactgcaacctccacctcatgggttcatgccattctcctgcctcagcctcccgagtagctgggactacaggcacccgccatcacgaccggctaattttttgtatttttagtagagatggggtttcgctgtgttagccaggctggtctcgatctcctgaccttgtgatccacctgccttggcctcccaaagtgctggggttacaggcatgagccaccatgcctggccctggccagctatttattactaattcaattttggagcttgttactggtctattcagggattcaatttcttatttgttcagtctttgcaggatgtatcattgttccaaggttataatcctcaagcttggccctgacgaactctctaattatattcatgtttcctcagttttttccttttaggtagacatattaatagaatgggctagaggagcctctatgaagggatctctcctttgattgtactctgcttgctgtaacacccaagaatgcagagtcaggctaaccccacttagaatctgcacatagggtcaggcctctgcctgggatttacaagacagggccagactttcaattgtgaatgtaatgaaaaccaacaaaatgcattttctgcattgtgagatgtcaacatagacatcttaaagcccccctttgagagtgtggctttttaagcttttcagatcttgtttagtgacctgctacagttatatgagaggctccaggtataaatagaatctgatgacagaatctataagtgtaaacaagcatcttaagagtgagggataaggccacaaagtatccagagctatgaccacaactatacctacctgtaaattgtaataatggagtagagtattcttgtccttcttacccaaaagctagcacatcaggataggtgatccaggttctggagttccaccaaagcagttccattttctatttagaatcagcatgaatctctctcagcctggcttatcactgggccatcagccttgagtcactgagaaccgtctcacaatcacctaggtgtctttaagacatttgaggatgtcagggacagaattgtgtcgggattacatggccaatttgcagaaatctctttacttgtgctctctccacaggttctgtgtattgttctaggtgaaagtattcatgttttaattgtgtctcatgtgactcttaaggtgaggacagaattaagtgtgtggggttcaagatagattcatgagagttaagtttcacctttgcactaaaaggtggtcacaggaactgttccgtttggttttgataggaagaggtcagtgtcacccatattttcattactatagcagaaattgctggtgtttgtggcaagggcaggcacatgaagacaaatagagaaacatatttttatattcattgagcagctcattgttcctgaatctctcctgttataaaggacaaaagtgagtgggctttttctgcagttcttctttttttctgtggttgtgaggctagcaggtaaataggtggtgctgacttctttacaagaattttctcaggatgcaggtgtaacttctccagagaatgtcatctgaaaaggatttccaaagaaggcaaaagaggaaaaatggctttttttttcagctaaatatgtctcagatgaagagctgtgtccactctgcctcctggattgccatgcgtttagtccttgcaaacctttacttccctacttgtgtttctttcccctaatgagtttgttttaactactttagaaaattcttgtgatagtcaagggtctctgcaaaatatctctctcctatatcccagaaccttctctacactctctaaatcatggcttcttatacgccatgcagaattcttaaaatgaatttataatctgcactacttaaaatgttccctttgttgccattgaacgtgggaaaatgtagatattcaagattcccattggcggaaagctggggtccttagtaaagataaataacatgtaatgttgtggtttcatctgttttctccattaattctatgcagaacaggattaataaaatgcttatttaaacaggatggtgtttattaccctgaaagttctgaaaaaaagttattgagagatacctgctctctcaggtgctaaagaaagactactttaaaatgttattaaaaattgcagaacatagaagatatctgcattttgaactctgcataaaactgatttttctgtatggttaacctcagactataatttactttttgaggggcaatatctcagcagtgatgatgtcttcttctgtgtgcatcagcacatcataaacatttgtcctaatgcagttgattttaaaatttacttaaaagagctctctgaaatatttatttcactatagagttaattatttttctcttcattattaagtatctttatgtagctaaggaagagctgtgcataaaccatcacatttaatctggcagctgcctttctttgttaggttttccttgcatttatctgtctttggaaaatgaagactcttatctttgtttacagggcagaaaaattgagtaaaacacaggatcttccacttactggatattgacaaaatattctttctgggccaaacacattggcattactagtgaacttgttagaaattcagaaactcagagtttatttcagatcttctgggaaaaaagaatctgcacaagatctccagtttactgttcacattaaaacttgagaggtgccttctaactcaacatatcttttgtctgaaaaatatacacaactcattctttgtgtggcaaatatagcactaaaaaatgtacatgtttgtgtttatgcctttagctttatactttactattaataaaagtatatatacagtggtgttgtagatcttataccattctcttctctcagagttagagaatacattagagaatatttctgtgttgaaaattgttggataatttcagtcattcctgtaagtcagaacgaattttctttactttctcatttgaccttaattcaaatgataaattttgcccacgtgtaaatgtgtgtgtgtgtgtgtgtgtttgtgtgtgtttgtttcaggggccgttgacatttagggatgtggccatagaattctctctggaggagtggcaatgcctggacactgctcagcaggatttgtataggaaagtgatgttagagaactacagaaacctggtcttcttgggtgagaataactttaatacaaaatcccttatataccctaaagttttcatttctctgttttcatagaataatttttggtaatttatgctttgcataagtgagtttctggtgcctgttttaaagaaatcttgaagaactgtccgtgtggaaaaaaatttcttcaggatgttttatcttggcctgatctttttacatttctgagccggtctgtatccttcactctacagtagtggtaatttcagaaatttagtagtataaaatattgttgtccatatgttaaaatctatatgccaccactaattttttatccatgaatactgggtggcaaaattaagcacctacaaatttaaaatattttctaaatgttaagaactttctgtcattaaatagtattttgggataaattttctagaatattctattacatcctctttactaagcatggtactaggtaggtaattagagaatatgagcaagattcatgttatttatttttaataaagcaggtattgctgtctctaagccagatctggtcacctgtctggagcaaggaaaagatccctggaatatgaagggacacagtacggtagtcaaacccccaggtaggtgagagtgaatgaaacagttgacatagatgaaaggttgaaagatttaaaaaaaaaaaaaaaaaaaaaagccagtcctggccgggagcaatggctcatgcctgtagtcccaggactttgggaggccaaggcaggtggatcacctgagctcaggagttcgagaccagactggccaacatggtgtaaactctgtctctactaaaaatacaaaaattagccaggcgtggtggcagttgcctgtaatctcagctcctccggaggctgaggcaggagaattgcttgaaaccgggaggcagaggttgcaatgagccaagatggtgccactgcactccagcctgggggacaagagtgagacttcatctcaaaaaaaaaaggaaaagaaaatagttatcaagtgaatataataccatcaccaaatctgtcctgctgatttgggaagctatgttccaaagcaaagagtttctcggaagcctttggcatttttttgttttttttttgttgttctttttctcacatagggccatcttctgtcttatgcttttaaattctctaaggattctactttctcttcattgatactcctttaagtttacagtgagagccaaatcatcttcatggcatataagagactgcacaatctgactgcttttccattgttttgggggacacacaaatatctgcatctgcatgattttgagaaactttatgttaaactattttattagttctttttttgcatcatttctaaaatgtatgagggtagtggtctctgttctattggtttttatgttaattttctgaacattccatcctgtttttattagtatattcttgaaatatagtttgaaattataaagtatgatgtccctctgctttgtttttttttctcataattaatttggctattcgaagtttattgtagttttttgtaaattttaaaatcgtagttttcattactataagaaaaaaatgccactggaattttgataggtcgtttgctgaatctatagattactttggagaatatggtactttaacagtatttattttttcaatccataaatatgaaatatttgtaaatttatttgtgtcttgcctaattccttttattgatttatatcttttattgttaacattttttgcctcgggttaaatttgttcttagaaatttattattttaattatatttttaaaaagattgctttcttggctgcacggtggctggggcctgtaatcccagcactttgggaggctgaggccggtggatcacttgagttcaggagttcgagactagtctcgccattatggtgaaaccccgtctctactgaaaatacaaataattagttgggtgtggctgtgggcacttgtaatcccagctactcaggaggctgaaccaggggaatcactattattaatcttaaaaaattattattattattttttttttgagatggagtctcactctatcgcccaggcaggagtgcagtggtgccatctctgctcactgcaagctccacctcccgggttcttgccattcacctgcattagcctcccgagtagctgggactacaggcacctgccaccatgcctggctaatttttttgtattttcagtagagacggggtttcaccgttttagccaggatggtctctatctcctgacctcgtgatccgcccgcctcagtctcccaaagtgctggtattacaggcgtgagccaccatgcccagcctaataaaaatttttttatttctattgtatccaatagcttgttttaagtgtgtagaacaataacttacacttttatgttaattttatattttgttaatttactgactgtattattagtttagacaaatttcaatgtactgtggttttttatgtgtaagattatatgttcctcaaacagcaactttttacttatttgtcttcagtttcaatggctttaaaaagaattcttttttcattattctgccacatgcttccagtgctatgttaaaatagaaacattgacaaagggcacaatagagtttactattggtgtctgtgaatttgaaatggcaaacaactccttaagtttttataagctgatttcaggaggtaaagatcttcttttcttgtgttccccagggttttgggatgccctctgggtttgtagtggagtggggttgtaacttggttgcaaggctgctggttctacattagggtccatatttagttgtcatgttacaagaggcttgggtagttgtacttcccaatttttttttttttttttttttttttttttgagacaggagtctcgctctgtcgcctggctggagtgcagtggtgtgatctcagctcatcaaaacttttgcctccctagttcaagcgattctcctacctcagcctcctgagtagctgggattacaggtgcccaccagcacgcccagctaattttttgtgtgtttttagtggagacggggtttcaccatgttggctaagctgggtctcgaactcctgacctcaggtgatccacccgccttggcctcctgggtgctgggattacagacgtgagccaccacccccggccacttgtttcttttaaatgcttattaaaagtttctcatcagaatattttatttataattatactgcatattctctgaaattttactgccaatttttcaaaatacctgcttttgatgagtacagttacagtcaaatactgtagttagacaaattcttttttaatggtatattaatgttgcataccaaattgtatgagttaaacgtctcttcctgtgcagtttcatattagtggtgttttcagtgtaggtatcttaatatcagcttatcgtggtttttggttatgtattataattttagtcaatttgcaattctgtctgtatactttatgtcaatgtgaggttgaattaaaagatagccatatgtctatcacaatcatatatgtgtgtgtgtttatctataaatatgaccccaatattggttatggcttatcttgtatatattctttctttctttctttttttttttttttttttaaggtggagtctcgctctgtcgcccaggctggagtgtgcagtggaacaatctcggctcactgcaacctcctcctcccgggttcacgtcattctcctgcctcagcctcccaagtagctgggactacaggcgcctgcaaccacgcctggctaattttttgtatttttagcagagacggggtttcaccatattagccaggatggtctcgatctcctgacctcgtgatctgcctgcctcagcctcccaaagtgctgggatcagagatgtgagccactgcaccctgcctcttgtatatattctttcttagctggttttcagtggttgttttatcttgtctaaatgtgtagtcatgtaaatattttcaccatttcttattttcatgatgtgtttaatcatgaatatatattccctttgtgtaagagaaacacttctgggatttgaaggtaatttttgaaaagatttataattctttatttttttcagtttttctgttagaaaattaattgttgtaaaaacacataaaatttagcatcttaaatctatttaagtgtacatttcatggcccaacatgtgggtggctcacatctgtaatttcagaaatttgggagtccaaaacaggaagatcacttgagcccaaaagtgtcagaccagcctgggcaacatatgaagagtctctctttacaaaaattttttaaaaatagccaggcgtggtggtatgcacctgtggttccagctacttgggagattgagaggggaggattacttgagcctggaagtttgaggctgaagtgacccttaattgtgccacttcatgtcagcttgggtgacagagtgagaccctgtctcaaaaagaagctgtatatttcaggcatgttaagtatattcacattgttatgcaaaagacttctaaaagttttacatcttgtgaaactaaaacccagtacccattaagtaacaacaacgcatttaccctcttcccagcccttggcaaacacccttccaatttctgtttttataagtgtgactacttaagatatataagcggaatcatacagtattcatcattttgtttctggcatataggtgacataatatttgcaaagtttatcttaaaatgtgacaatattttcttctttaagactgaataatatttcattgtgtgtatatatatatatatatatatatatatatatgcaacacttttgatgtgtttataaatcaagagacatctgagttgtttcagccctttggcttttgtgaatacgggtacaataaacatggatgttctaataggtcttccaggtcttctgttgcatattttgactataaattcataaatgggattgctgtatttgatgataattccatttttaattatttgagaaacataacattttaaaataatgattgtatctttgttttctactaacaatcaacataggtttcatttttattgcatcatcaacatatttggtgtgcttaaaattttatagtggccattgtaatgggtgtgaggcaattttttcattgttattttcgtgtgtttctctacaaagtattaattttctgtgtcatttcaaatgctctttttctatatgtgtatcttttctgatgaaaattttgttcaattatttgctcatctataaattaatttagctttattgttcagttttaagagttcatatgttatgaatattaactactatcacatatgatttttgaattttcttaatgtgcggaaattttcaagtatagtgtagttacatttttctgtttttttctttgttgttcatgcatttaatatcatatctaagaaaatggtgccaagactcatattatttcttttttctaagagatttattactttttcatgtctaagtttttttgtttttgtttttgtttttgttttttgagatggagtttcactcttgttgcctaggctggagtgcaatgggatgatgttgggtcacggcaacttctgtcttccaagttcaagcagttctcctccctcagcctcccaagtagctgggattacaggcatgcatcaccatacccagctaattttgtattttttgtagagacggtttctccatgttggtcaggctggtctggaactcctgacctcaggtgatccacctgccttggcctcccaaagtgctaggattacagacatgagccaccacccctggcctcatgtctacggaatttttttgtaaattttgtgaatatagtttttaaaaatgatgtaactgtatttcatcagtgttgatgtttttaacattattttttgagaaaattatcttttctgtatcgtgtgctcatggcaactttgcaaaagatcatgtaatcatatacagaaggcttcatttctgggctctctgttctgttctttcatctttttatctttgtgtaagtatcacactttttgttattgtagcttttaatgtgttttgaaatcagaaagtataatgtctctctgttcttttttatgagtgttttgctagttatagtttataatcaaattataaaatgttaagcaggttgggtgcgctgtctcacacctgtaatcccaacagtttgggaggctgaggcgagcagattgcctgagctcaggagtttgcaaccagcctgggcaacaaagtgaaaccccgtctctactaaaatacaaaaaattagcagggtgtggtggcgtgcgcctgtagtcccagctacttgggaggctgaggtgggagaattgcttgaacccaggaggcagaggttgcagtgagctgagatccctccactgcactccagcctgggtgacagagtgagactccatctcaaaaaaaaaaaaagttaatgtttttgcaataaaactgtgctattgtaattttttttttttttgagatggagttttgctctttcacccaagcaagagtacagtggctgaatctcagcttactgtatcctctgccttttggtttcaggcaattctcctccctcaatctcacattgcattaaatctgtagattacattgagcattatggacatcttcaaaatatttcaaattttgaacaggagcatgctgaagagtgtgttgtttaatttctatgtatttgtacattttttttctctatcttatactgccgagaccagctcagtcggggagaccctaacccaacggtgctagaggaattaaagacacacacacacagaaatatagaggtgtgaagtgggaaatcagaaaaggtttggagctgagagccccaaacagagatttacccacatatttattaacagcaagccagtcattagcattgtttctataaaagattaactaaaagtatcccttatgggaaatggagggatgggccaaaataaagggatgggttgggctagttatctgcagcaggagcatgtccttaaggcacagatggctcctgctattgtttatggtttaagaatgcctttaagtggtcttccaccctgggtgggccaggtattccttgccctcattccggtaaaccgacagccttccagcatgggtgttatggccatcatgaacatgtcacagtgctgcagagatttagtttatggccagttttggggccagtttatggccagattttggggggcctgttcccaacatgtctcttctttgatttgcaaatcaataaaggcaaaggcagctttgtcacggtgagctacttctcgcaggagtcaggatccacatctgcagactatcagcacagattaaaagcacaatcatctttgaaatcacagaacttccaagtgtttttatccattttaatgggttactagctgctaatctgtctgcagctccattaagcactccagttcttggcattaacatcaggtgtgcttgggatgctttaaatattttaattttgcaatatccaaaaacaactttgtagagtgtctttctagatgcttttttattctttcccaaattttgatcttattaagaactattaatagtgtccacaaatccttgtgtttagctcctacagcaggccttatcatttgaggtcgaggtgccactatactgccatggttccagataatagaactcttgccatacttcttatcatttctatcatctgaccattttgttcagatcagctgaacacagtgtggctgtggcacacagactgagaggtgcaatttaagctaaacatccccttaggagaccagctaataatgattccatgggaatcattgtgcagcacctctgcctgttctgcaatgcaatctttctaaagaagtacattcattttttctggccaggtactattttgtttacaaataggtttttgagggcggtatgcctcaattataggagcagatttattatggtaaatactgagataagaaagcatgtgtaactgtgtcatagagtgattacatccaggcattattaccagccaagatagataaatatgcccaataagtataattgttctctgtgtcagcccttgttgaaggaatactcatggcaatggtgataactgctatcatagctaccattaaattgctcattgtgactggttgtcccactttcttcaggttttcttccgccatctgtgacagcttcttgatctgtcccaaggtgggtggctgtgttcgacgtgtgttgcttgtgacgcttggggttgtcctcagcatcaatcttgacatggctgcaacgagggggtcctcgggatcctcccagaatctcttcctcagcatctggctcatgataaagtttcaggtatcttgatggtatccaaatcagctgttgattttggcctggaggaacacaagcataatctctaccccaagttattttacccatttgccaactttttgttattggatctctccaccaaatcagttgttctgcttctctctttgcagctggtttctgtacatgctgttcagctgctgataacatctggcctttgggcaggctcaaaaaatttaaagttaataatgctagattcaggagcatctgtggggttacatattgtctatttccccccgtctccttctgcaactgctgttttagggagagattcattctttccactatggcttgtccttgagaattgtatgggataccggtaatgtgtttaatattccacacagagaaaaatgtagctagagcttggctagtatagcctggggcattatctgttttaatagaagctggaatgcccaccaccacaaaacactgcaaaaggtgatgtttaactaacacaggcagaagactctcctgattggcatgtagcccagacaaagtaagaaaaggtgtccacacatacatgtatataagctagtctcccaaatgagggaacatgtgtgacatccatttgccaaatagagttaggttccaatcctcgaggattaacccctcctgtaaaagatgaggaatgtaccatttggcaagttgggcattgctggataatagctttagcttctttccaggtaatgctgtatctgcatttgagactagaggcattaacatgggttaaattgtgaaagtgtctagcattagatattgcgttagcaactaggcaatcggccatttgattcccttcagtcaaaggtcctggaagaggtgtatgagcgagccctaatgtgagtgatgtaaaaaggatgcattgtactcctaactgctatttgcaattgggtaaataaagtgatcagttgttcatctgtatgaaatcgtaactgagcattttcaataaactgtgtggaatgaaccacgtgtgaagaatcagaaatcacattaataggcatatcaaaagcagtcaatacctcaattgcagctacaagttctgctttttgagctgaagtatagggcgtctggaaaactttacttttccagccagaataagaagctttaccattactaaacccatctgtaaaaacatactcagcaccttcaattggtttacatttagttattttagggagaatccaattagttaatttcaaaaactgaaacagttttgttttaggaaaatgattatcgagaatgcccacaaagtcatctaaatgggtttgccaagtaagactatttataaaagcttgctgtatttgtaccttcgtgagagagacaataacttttccaggatcatatctgtgtaatttaacaatccgagttctcccaatccctatcacagtagcgatttgatttaaataaggagttagagtccatgaattagtatgtggaagaaaaagccactctactaagtcctgttcttggacaataacaccagtaggtgaatgctgagttgaaaaaattagcaaatctagagtcttctctgggtctattctatttatttgagctttatggacttgcttctcaattagttgtaactctccctcagcctcctttgttaattgctgagggctagtgagactaggatttcctctaaggatagaaaacagattactcatggcataggtaggaatgcctagagcagattgtatccaattaatgccccctagtaatttttgaaagtcatttaatgttttcaattgatccctacatattgttcctttctgtggcacaatggtagtgtcatttactagggtccccaagtaggagtagggagtagtagtctgaattttgtcaggagccataagtaaaccagtgcaagaaatcaaattttgcaagggatcataacattggagtaatatttctcaagtggcggcagcacaaagtatatcaaccatataatgaataatgtaacactgtgaaaatattttatgagtaggtcaattacttgccctacatatgtatggcaaattgttggactgtttaacatgccttgtggcaacattttccaatgaaaacgcttagcaggctgctaagcgttgttgtttactgcaggaattgtaaatgcaaaccattcacagtcttgctcagataaagggatagtaaagaaacagtcttttaaatctatgactattaaaggccaattttttggaattatagcaggagaaggcaatcctggttgtaatgctcccataggttgtataactgaattgatggctcttaagtcagttaacattctccatttacctgattttttcttaattatgaaaactggagaattccaagaggaaaatgttggagctatgtgcccattttctaattgttcagtaactaatttctctaaagcctccagtttctctttatttagcagccattgttctatccaaattggcttatctgttaaccattttaaaggtataggttctggaggcttaacaatggctgccatcaaaaatgatatcctaatctttggcgggaactctgtttttccgctggaagtggttttttcaaaccttgcacattttttttctagtaccataccagggacataccccatttcatgcattgtatgttctttgagggctatataattgttctggaattagaacttgtgctccccattgttgtaataaatctcttccccataaatttataggtacagaagttataattggttgaatagtcccaggttgtccatcgggcccttcacaatgtaaaatataactacttcgatatacttcaggggctttaccaactccaactatattaaattgagtgggttgaattggtcacgcggatggccaatgctgtagagaaaagattgaaatgttgactcctgtatctaccaaacctttaaatttctttccctgaatagttatgtcacaggtaggacgtttactagtgatttgatttacccaataagctactttgccttgtttatttgtgcttccaaatcctcctgttcgtttaatttcactttttcccattcccacttatggcacaatcaggagctgtgctatgcgctctcctggctctgctttccagggaacagaagtagatataacaatttgaatttccccattgtagtcttgaatcagtgactcctgtatatatttgtaccccttttaaacttaaactagaacttcctagagctaactcctattgtccctgctggcaagggtccacagactgctgttgggaactttagcgggggttcccaaggcagaaggctcacaggttttgcagcataagtctactgtggcactaccagctgtggcgggggacagacattgtacaggggtgagggaatggcctgagctggaaatgccccagtttagaacggggcctgagacaggcccctcatggcatttcccaaaatcaggttcccatctttatcaaacagagtggcactgattagcccaatgttttccttttttacattttggacatatttcagactcagtagttttcttttttcccctatctggtggcctgacttgctgattttttctacattcttttttagtatgaccatgcttcccacagttaaaacaagctccaggaaatggagtatttcctttatccactctcagtcttgtcgttgcctgtgctagcagagtagccttacgcagattacctccaataccatcaaaggcctggatataatcaactaaatgtgctttccctctgataggtcacacagcagcctggcaatcgggattagcattgttgaaagctagtaactgcaacactatatcctgagcagccgaatctgtaatcacctttttaagagactcctgtaaccaagctgtaaaatccatatacggttcttttggtccctgttttatagcactaaaggaagggtattattctccacatgaagtggtcttttcccaagctgtaatacacactcctgtaagctattctgtggcatcatcctgcatgaccagttgtgcatctaaaccagcccagccgccaacccccaaaagttggtctgagttatattaatttgaggatgggcctgggtattgcgagcagcctgaatggaagcttcatctgcccaccaagttttaaattgtaagaactgggcaggagttagacaagctcaagtaagagcatcccagttagtaggaatcatcagactggaaacggcaacattctttaagagtcttattacaaaaggagaacctagtccatactgattaatagcttgtttaaattctttgagtaatttaaaaggaaaaggctcaaatgtagctataatatttcaccattgatctggggagtgtattctaacaaggaactgccaagcctctatatcactctctcgtctagcttgctgaattcctgcctgaatggaactaagagcagttgctcgaggcactgctcgaacagtcactggggcaactacttttcacccagtgtcctctggaaaagaaagatctggagggtcaggccactctttttcttcaaaataataatgagggggtgtagaagggtagggatgaacctctccctcctgtgcctctttagctttcactggcaaataaacctgatatgtaacctcttctgttacttcattacactctccttcctcctcattatcagtgtgaaaaagttccaaggtggaatgaaccacagcacacacttgtcccattgttaccctgatgcttccaagctccccttcttactcatcatggggattgctttaagagtacttgggtgtcctccggcttagttctacattctccaaccatcactccactgaccttcaacctggattcgagcccccatgatggacgccacttgctgagaccacctcggtcagggagaccctaacccagcggcactagaggaattaaagacacacacacagaaatatagaggtgtgaagtgggaaatcaggggcctcagccttcagagctgagatccctgaacagagatttacccacgtatttattaacagcaagccagtcattagcactgtttctagagatattagattaactgaaagtatcccttatgggaaacgaagggatgagccaaaataaagggatgggttgggctagttatctgcagcaggagcatgcttttttttgtggtttaagaatgcctttatgcagttttccttcctgggtgggccaggtgttccttgccctcattctggtaaacccacaacctcccagcgtgggcgttatggccatcatgaacatgttacagtgctgcagagattttctttatggccagttttggggccactttttggccagattttggggggcctgttcccaacatgtaagctcagtgctttgctgagttctctgagtaatctttcaaattattcaaattattgaacttgaggaggaagatgtggaagaccttggcttgttagcagtagttcagaaatagatggttatccagagccatgtgactggcatctgtagttgcgacagtgttgtgggactgagccctgaacttgtggattctgtgttgactctgggtggtgtcagaattgagttgttggacagccagttggtgttggataattgattggtgttcagcaaactacaactttttttgtcagacgagatctaccacaggggccttgtattagggttctctagagggacaaaactaataggatagatatatatgtataaaggggagtttatttagttttaactcacatgatcacaaggtcccacaacaggccgtctgcaagctgaggagcaaagagagtcagtctgagtcccaaaactgaagaacttggagtctgatgtttgagggaaggaagaatccagcacgggagaaagatgaaggctaggccaatgtaaccttttcacattttcctgcctgcttttgtatgctggttgtgctggcagctgactagatggtgcccacccagattaagggtgggtctgccttttccagcccactgactcaaatgttaatctcccttggcaacactcaaagatacacccaggatcaatactttgcatccttcaatcaagttgacagtattaaccatcataggcctgggctggagggagacttcagatgtctgagggaagtgagggtttattctgcacacaggctgtcacattgtacattgtcctgctattctgggtctcctagggtgagagggaagagagagtaaaaatgttctgagaacttattccctctccccactttggtgccaacccccacatgattctgacccactcttgaccatacccactaaaaattgacacggccactcctctcccaggacaaggttttaccctcaggaattatgcccacaatagctttgcccctagagttttctgccaagaatatacacaggtgcctagaagacttctggcttatctcaaccccagacactgaatctgtagcaggaacctgtctccttcaccaacacaggcttctggacctcctgattataatctcttctgcctgtacagacacaaagttttctgaaacaaagagatttactaatgttaatttattgttctatttgattcttgtatctttgtcccacattttctgtctctttgtgtcttctttatttttattttatatgcttttacttcttccttattttgttttgtgtatctatatagatgtattctttgtgctaagaaatttatttttgtgtatgtgcatatctttcccagaaaataatgtattttaatatgattatatgttgttttgttgagtcttgttatttacattggaagcaactgccttcagcgccttttatatataaggcagtgccaatatacttctttagaattcatttatttttgaagtttttttttctttttatttagcaggacagattttgtgatggtattatactcacttgattatatatatatatatatatatatatatatatattttttttttttttttttttttttttttttttcagaactttgactatatcacacaatatccttctggcctgcaaaatttttcttgagaatccacttgctatctcataagagtattcttgcaaataacactttttttttttttttttgagacgaagttttgctattgttgcccaggctaagtgcaatggtgtgatctcagctcactgcaacccctgcctcctttgttcaggcaattctcctgcctcagccccccgagtggctgggattacaggcaggcaccatcacacagcaaagtttgtatttttagtagagatgggttcccccatgttggtcaggctggtcttgaactcccgacctcaggttgttggcatgccttggcctcccaaagtgctgggattacaggcatgagctgctgcacccagccaacacatcacttttatgttgcagctcccaagattcccttttctgtgacttttacaattttgcttacatatgtgtttgatataaatatctttgcttgtatcctagtttgtttgttgagcttttttatttttacatcatttttcaagatttttcagggtttttttatatttttttacctccctaatttgtttactaatgttttaaatatttttgttcttatttccagttttctgattttctgtagttctctgtgttcatatttcactcattgagtgttactgaatttatttcattttttattgtttcttcctcaaatttttattttattttatttttgagatagagttttgcacttgttgcccaggctggggtgcaatggcatgatctccacccaccacaacttccacctcccaggttcaagcaattctcctgcctcagactcccaagtagatgggattacaggtgcctgccaccatgccagactaattttgtatttttagtagagacagggtttctccatgttgatcaggctggtgtcaaactcgtgacctcaggtgatccacccacctcagcctcccaaagtgtgggattacaggtgtgagctactgcacctggccacattgtaatcttttataaaaatttgaacattaaaaagttacctgtcacaatctttgtaatatggctttctcctggcatactttgaacaattgtctgagttagagattctgagagtctctcaaacatgttctttgagtgtgtcttgtctgaaattttgtgtttattttttagttaaaggaaattattcatctttttttttggagatggagtctcagtctgtcatgaggcaggagtgcagtggcacgatctcagttcactgcaacctccgcctcccagattcaagcaattctcctgccacagcctcctgaatagctaggactacagataagtgccaccatgcccagctaagttttgtattttcagtagagatggggtttcaccattttggccagcatagtcttaatctcttgaactcgtgatccacccgcctaggcctcgcaaagtgctgggattatgtgcatgagccactgcacctggcccctagtcatcttttttcttaatactcagtaatcacttgctacacctgttttctttctgtggcactgcagtctctctactgctgtaacatttacctttggtctcagcagactcaaactgtcattccaaagtataccaccatttctttctgcactatatatcatagaagacagaagccagtgtgtggaaaggcctggacaagcaagtaataaagaaatttgagccagtattttactagtctttttttttttttaacaaaatcaaaagttggcaagttacttctttatttatttatttatttatttatttatttatttatttttataattttttttttttgagatgtattctcactctgttccccaggctgtagtgcaatggtgcaatcttggttcactggtaccttagcctcccaagtagctgaggttacagcttgagccactgcacttggctgggaatttacttctaaaggcattatgttatattgggaagcaggaatagccatgttgggtaaatgtaacaaacatttgcttttcccttctgtgtgactttgtgctcacctggggtacttcaaacacttaactcatttataattttttctcagatatattttggttagtatgttttcattacatataaagaattagagcctttggtattttgctatgctatctggtttatgcagtttgtataatattatagtttagatttgtaatctatatttatctgagtctagtaagtggagtaatttgatatttttatttctttcagttatatgttctcattttgctgaagacttttgcccagggccaggcattaaagattcttttcaaaaagtgatactgagagaatatgtaaaatgtggacataaggatttacagttaagaaaaggatgtaaaagtatgaatgagtgtaatgtgcacaaagaaggttataatgaactaaaccagtatttgacaactacccagagcaaaatatttcaatgtgataaatatgtgaaagtctttcataaacttttaaattcaaatagacataacacaaaacatactggaaagaaacctttcaaatgtaaaaaatgtggcaaatcattttgcatgcttttacacctatgtcagcataaaagaattcatattagagagaattcttaccgatgtgaagaatgtggcaaagcctttatctggttttcaacccttactagacacaggagagttcatactggagagaaatcctacaaatatgaatgtggcaaatcttttaaccaggactcaaaccttactacacataagagaattcatactggacagaaaccctacaaatgtgaagaatgtggcacatctttctaccaattctcataccttactaggcataagctaattcatactagagagaaaccctataaatgtgaacaatatggcaaaacttttaaccaatcttcaacccttactggacataagataattcataatggagaaaaaccctataaatgtgaagaatgtggcaaagcctttagtattttctcaacccctactaaacataagataattcacactgaagagaaatcccacagatgtgaagaatattgcaaagcttataaggagtcctcacaccttactacacataaaagaattcatactggagagaaaccctacaaatgtgaagaatgtggcaaagcctttagtattttctcaacccttactaaacataagataattcacactgaagagaaatcccacagatgtgaagaatgtggcaaagcttataaggagtcttcacaccttactacacataaaagaattcatactggagagaaaccctacaaatgtgaagaatgtggcaaaacctttagtgtattctcaattcttactaaacataaaataattcatacagaagagaaaccctacaaatgtgaagaatgtggcaaagcttttaaacgatcttcaacccttactaaacataggataattcatactgaagagaaaccctacaaatgtgaagaatgtggcaaagcttttaaccaatcttcaacccttagtatacataaaataattcatactggagaaaaaccctacaaatgtgaagaatgtggcaaagcttttaaacgatcttcaacccttactatacataaaatgattcacactggagaaaaaccctacaaatgtgaagaatgtggcaaagcttttaatcggtcctcacaccttactacacataagagaattcatactggacacaaaccctacaaatgtaaagaatgtggcaaatcctttagtgtattctcaacccttactaaacacaagataattcatactgataagaaaccctacaaatgtgaagaatgtggcaaagcttttaaccgatcttcaatccttagtatacataagaaaattcatactggagaaaaaccctacaaatgtgaagaatgtggcaaagcttttaagcggtcctcacacctcgctgggcacaagcaaattcatagtgtacaaaaaccctacaaatgtgaagaatgtggcaaagcctttagtatattctcaacccttactaaacataagataattcatactgaagagaaaccctacaaatgtgaaaaatgtggcaaaactttctaccgattctcaaaccttaatacgcataagataattcatactggagagaaaccttgcaaatgtgaagaatgtggcaaagcttttaaccattcctcaaaccttattaaacataagctaattcatactggagacaaaccctacaaatgtgaagcatgtggcaaagcttttaggcggtcttcacatcttagtagacataagataattcatattggaattcatactgaagagactgtacaaaagtgaagaatgtggcaaaggcctttactgctcctattcccttactaaagaatgtggcaaagcttttcaccagtactttacccttaatacacataagataattaatgctggagagaaaccctacaaatgtgaagaatgtggcaaagatttctattgattctcataccttactaaatataagataattcatattggagagaaattctacagatgtgaagaatgtggcaaaggctttaattagttctcatcccttactaaacataagagaattcataccatagagaaatcctacaaatatgaagaatgtgacaaagcttttaaccacttctcaaccctgcctacacgtaagataattcatactggaaggaaaccctacaaatatgaggaatgtctcaaagctttttactgattcttataccttactaaacataaaataattcataaaggagataaattatacaaatgtgaagaatgtggcaaagcttttaacaaatcctcatccattagtaaacataagataattcatactggagagaaaacctacaaatgtgaggaatgtggcaaagcctttagcctgtccctccaatttactgcacataagataatttatactggagagaagccctacaaatgtgaaaaatgtggcaaaccttttaaccaatcctcaacccttactacacattagataattcatgctggagagaaaccctacaaatgtgaaaaatgtggcaaagcttttaaccaattttcaaaccttactaaacataagataactcatactggagaaaaatcttacaaatgtgaagaatgtggcaaagcctttatccagtcctcaactcctagtaaacataattaatgatggagagaaaccatacaactgtgaagaatgtggcaaagcttttaaccagtcctcaaactttattgaacaaaataattcatacaggagagaaaccctacaaatgtgaagaatgtgacaaagcctttaaccagtcctcaatttttactaaacataagaaaattcatactggagagaaaccctatgattgtgaaaaatatggcaaaggctttaactagtcctcagttcttaacacacatacgataattcttactgcagagaaactctacaaaccagtaagatgtgacagtgcttctgacaacatctcaaacttttctaatcataaaagaaatcatattggtgagaaatcctagaaatgtggagaatgtaacaaagtatttaaatggttgtcacacttgattataggtaatattcatattggaaaaatttcctacaagtaagaacaatgtggcaaagtttttaactaatacaccttattgcacagaaaatcatttatatttgagaaaaattgtagaaatatagactgtgaaaaagacgtcaatatctgctcacatcttactaaacaccagagagttcatgcttaataaaagcatgataagtgcaattactgccaaaagatctttcagaaaatattatcctttaaagtgaaggagagtatttatattaaagatgaacattacaaccataaagagggttgaagtacctttacttgtatcagatcttattgtccacattttgtactacagaaaaactctgaagaggtcactcaaactttgttcaacatcagggaatttatattggagagctgtcttgcaaatgtaataaatttgggaaaacaaattttcaaaaactacagcttagaaaacaccagagtttatacgaaaatatattttcaaaggtgtagtaaaaataaaaaaaattttaatccaaatttgtctatgtaaataccagaatttatagtagaaatatatgaggaagcgacacttcgaatattctactaaatgagagttctgagtatagaaaataaaactaaagttggtagaaaaattatttgtatataatgttaagaggagtaaaagattttttgtagaataataactatattcggattatactttgtttcttgaaaaaattacagattttttgaaaagcaaatgatgtaactcaactcattattttctgctgtttcttcattcttattcacttgtgaaagcttgtgatcatttgttgctgcatcagaggtatgagagattcttcttcattagatgggcattatttatgatcttttctatggatgagtaagaatattaaaatgtaagatgcatggtgaaaatctaagtggagaggttctttgtggttaacttatactattgagtgatgcacaaggtaggtgttaagagtaatattcttttgcattatgagaaaactagtatattattcatatattttactaattgtactttttttattatactttaagttttagggtacatgtgcacaatgtgcaggttagttacatatgtatacatgtgccatgctggtgcgctgcacccactaactcgtcatctagcattaggtatatctcccaatgctatccgtcccccctccccccaattgtacttttatataataaaatgcagtacattttaaaaaattttaaattctgtgtgaaggtaactgtttcaacatttttaacatggtaaatattattgtgcattcaataaagtgttgttatgccacaaagattaacattttccaccttaccaaatggcatacgtaaaagatggtaacaatatactatttggtaacatcatggactaacatctgtagtcatctcttttgccagtggcttcgaactgcaaataagttaaagaatattgttcttataggttaaatttttatttttattttaatcatttaaatttatttttcttaatttttgtgggtacatgagtttatatacttatgccatatatggcatattttgatacacaaatacaatatgtaataatcacattgggatacgtgtggtatccatcacctctagcacttatttctttgtattaaaaacaacccaattctacacttttacttattttaacatgtacaattatggccaggtgtggtggctcatgcctgtatcccaccactttgggaggccgaggcaggtggatcaccaggtcaggagttcaagaccagcctggccaacatagtgaaaccctgtctccgctaaaaatacaaacaattagctgggtgtggtggcaggcacctgtaatccaagctacttaagaggctgaggcaggagaatcaagggaacctgaaaggtggaggttgcagtgagccaagatcatgccagtgtactccagcccaggtgacagtgtgaggctctgtctcaggaaaaaatatatatatacaattgttattgcctactggtttatttttatggttataataaaaattattttaaaatgtgcagttatggttgggtgcagtggctcacgcctgtaatcccagaacttttgggaggcccaggcgaatgaatcacctgagcttaggagttcgagatggccaggaacctgggaggtagaggttgcaatgatctgagatcgtgccactgcactccagcccaggcgacattacaagacttcgtctcacgaaaaaaaaaaaaaaaatgaacagttaaactgtaattgactaatgggttatttttatggttataaaagaaatcatatacaagtataaataaaatacatacacttctgagtcctgagtagatatcttaaaattttatacatatatatatatttgaacatgtgtcctgtctgcatggaaacacataccgacttaatttgggttaaatatacattactctaaaagataaactttaggcgtaaggaaattataaagtaagtgagtttgtgtgagtagaagtttgtacttattttcagaagaaatattggggaaaaattattttaacaaggtgactagtataaaactaaaagcctcaaaaatgctgaaagcaaatgtatactctgctttgtattgaatttattactagagttattgtatatgaaagtgtttcttaattttcattttgagatagttgttaaggcataggaatgctactgactttgatgttgcttttgtattttgaaagtttaataaatttgtttagtaaaatcttaggcttttcttttttctttttttttttttctttttgagattgagtctctcttgtcactcaggctggagtgcagtggcatgatcttggctcactgcaacctctacttcttaggttcaagcaatcctcctgcctcagcctcacaagtagctgggattacaggtattgtgccaccaggcctggctaattttttactttttttttttttttctatttttagttgagactgggtttcaccatgttggccaggctggtcttgatctcctgacctcaggtgatccacctgccgcaacctcccaaagtagtggcattacaggcgtgagccactgcgcccagccagtcttacttaggtttttctatacttcagattatgcatagggataaaagataattatacaggaataattaacttccatttgtcctatctggatgcttttgattttattccctaattcctttgtcttggatttgtactatgtttagcaagactgactttagtaaggatgagtgggcatccttgccttatactagctcttagagtaaaatcttgcaaggtatccctgtttaatatgttgttagctgtgtattttttgctaatatgtgacatttattggctgaggtgccaataatttgatctataattagtttttcagagattatcataagggaatgtcaaattttgtcaaacttccattgtgcatctattcttttgtactctgcatctatttacatgttagagatgtaaaatcacaactaattttacatatatacaaaaaatcatcagagactactatgaacatctttatgcatgcaaactagaaaatttggagaaaatgaataaactcctggatacacaaaactttccaagattgaaccaggaagaaacagaagtctagaatgggcaaaaatgtataaaacatatgatgaaattaaattagtaacaaacctaccaactgtaaaagccctggattatgtaaaatcacagccaaattttaccacatatacaaagatgggcttgtactactactgaatatactccaagaaatccaggtgggattccaccctaactcataatatcaatattatcttaattccaaaatatagtgaaggcacaacaaaaaaaggaaactgcaggccaatatttttggtaaacattgaaacaaaaatcctccatgaaatacgagcaatctgagttcataagcaaatcagaacgttagaataaaaataagacaagaatatccagtctaacactcctattcaacataattctagaagtcctagtcagagctatccaacaaaataaagaaattaaaagcatctaaatagaaaaaaaggaagttaaattatcttcacgatgatataatgctctacctaggaaaccttaaaaatttccagaaatattttaattttaaaatgtaaattatgactgtttaccttcatttctgtgcattttttggttaatattatggctgattgacaacatgttttaagaaaacttcttggaccaaagccattactttattaacgtaatttgagacaaaatagcaatgaaagtcaacattgatgagtgaaacagttacgatctagtccctgataatcatttcctctcccacccaacatgcaagcaccatctttgtgtcatctctcccagttctaagtgttgcaggatgcagaggactagagagaccagtatcggtgaatacaggagcatatttattttaaggtaggcaccagctcagtggattcacatccaaacttaaaaagcaaagactgagctcaaagactgagcaaacatacagaagcaaaacaaaggcagttaactatataatgacaggtcacgtaatttatagcataactgatgacttggcataacttgtggcttggcatagctggtagccgtggagctgcgttgaaagaaaaaagaactggctaatatagacatttgtttgtttgtttgtgtccttcacccttgcttcggaggggactgtctggagcctatttctttggttttgccttcttgaacaaggttatcttctaattttccttgaagtgagattgctaggcagaggaaaacttttctttttaacccctgccttgccacattctgggctttggcttttacttttcttggagttaatgaatgcagtacttattattttaaatttctgcctcagtttctcccctttgatgctttttataaacaaaattttaatagaaagcatcactattacttgattcattaagagacagcaggttttcttctttaggaacaggttgatatttatgcagagcattaggtgagtggtagtttgcctagctacaattgtctctatagttgattgaatgctcctaataaggaaggattaaaggcaaggaagtatcaaacaacctcctagtatggttagaactagtccttttaaggttttgaatccatcaaaggaggaaaaccagcctccaaagagggaatcaggagtccaccctttccaggtctggactgaaatatgggctaattttttcattcttgcagttatttctacaaagctttctcattgttatcaatttttaagcagcaattagttagattaaacttttcacatattccttcttcctgggctaggagatagtctaaagccaggctattttgataaacggcctttctcatttttgtgggctgctgggcaaagaagtctaatgcatttgttgtttcattagtgataatttcaaggactgcctgcaaccttatgatgcagttaagcatgtaaattgaggtgcagtacccccatgacccattttgtgcctaggtagctggcccacattattgaatccttctttcagtggccaatctgtatccttcaaatctcctttttttttttttttgagacagagtctcgctctgtcacctaggttggagtgcagtgccacttggctcactgaaagctccacctcctgggttcacgccattctcttgcctcagcctcccgagtagctgggaccacaggtgcccatcaccatgcctggttaacctttttgtatttttagtagagacggggtttcaccatgttagccagcatagtctcaatctgctgacctcgtgatccacctgcctcagcctcccaaagtgctgggattacaggcatgacccaccatgcctggcccccaatctcctatttgtatgtctttttttatgtttatatttcttttgtttcttcttttaatttcatcatagacaggataccctaaggtttttccttgttgcagtgggagtaaaaagaaatatggcttaattgtcttgaatatacaagcccctatctattttccttgtaactgttggtaggcccatggcccacagatccaatcaagaccagagggtgcttgtcaggtatttggagcttcaagctgataccaggtgtgatttagagaacagaaacaggagaacggatttggatgaggtgatttggagtcatttctgccccgccacaaagtttttcttagtgtttcattataatattgctgttctaagcaggttagttctcttactgggtttgtaaaagcctttccccagcgagcaacacagtatcttccaatgacagaagtttttcagagccagagacttgaacttacaggcattggttcaggggaattgtcagttaaagtaaaattatcttgtggcattaacgtttttgcttttcaaggccactggtctcccatgttcctctgtaaacataacatgaagaaatgcctaggctgccagcaatgttttgagccagctgagcaaacaggttctcagctaaaggaagagactctggtaacttctagtttacatgcttatagaatgatttaaagacttcggattgttgctgagccagacaggtccaggtttcttttttgataacatatagttaggttgctgggtatgtatttatgtagacatgtaagagtaacctgtagtccacatgggtaagtctgactttagaatggtgaagtttacaggattacaggtttttattttgcaatctggttttactggcattttggtaagcataattggcctctgttgtatgctaaggtgccatgatatgcagtaccaacaatccttttttgggatcccagcggaacaaggaggagttactcttggcatgcatatatatttgtagttatttctatagtatttaagggtaagttaccacagacgggtgagtctagtatgctgcctgataggcatccaagtacagagaaacaggcccttggtaaaagggagggaccttggtttggtttaagaggaaattttcctttgacattgcacgaatcttacaccattcaccaggcgaaaatttagagtcagagaatacataaggtttgttattttctgggccacaaattgagcaggtagtctgattataagtacaagttcctaagtgagtccctgtacacttataactatggtacaatagagttttagttataccagtccctgaccaggtagtatgtgtacagtggggacacccttctataggtgcttcttctagcatggttaagggggtaacaacagcaaaacaatatacagcttatttatattcagcaaggacggaagaggtctttatttgggggaggagactgagcacagtgacagaacaataggaaaacagtattacaaggaaaactactacttttaggatttttaaccacatttacttgcttgacaagttcttaagctttggctgtgcatagactagtcagattcctgtgtgtgactagagtagggcttgttgtcttcttatgcttccgccattcatagactggtcagcttccagaatgaccagagcagggcagttgtctttagcagcagcttgctctcgtctcaggatcagccgggttggatgatctgggtcctgctggctggcccacttgtcttgggctgctggttttagccaactgtggtggatccaagacacaacacctgaaactttaacagcagtgggagtggactagattacagtataggacccatcctatatgggtcctagagaagttggattcaactttttaaaccaaacagtctccaggtttaaaggggtgtactgggtctgtcagacttacaggttttttttaatgtaccaagtaatggacactttgcatagctatccgtagagcctgcatttgctttttaaagttaattcccctagttcctggagatcaacttttatttcgcttatgattgggggaggctgaccgaacaaaatttcacagggcaaatacccagtttgtttgctgggggtgcaactgactcagaggacgaccataggcaagacttgattccatcttagatgaatttcctgatattttttaagtagctgcttgagtgtcctgttcatacatttcactttttctaaacttcatggccgataggctgtgtgtaacttccattttatttttaatagtcttgttaaatcttgcactatttcagccacaaatgatgactcattgtttgatcctaaagttaaaggcagtccaaacctggcgataatgtcttttaaaagtactttagttacttttcatgctttttctgtcccggtggggaaagccttaacacatcctgaaaaggtgcaaacaagcactagcacggactggtagtccacagcatggacagttctgttaagtctgtaaccacgcttttacaaggcatggcttctacttcccgaattcctgggggccaagtgggcccctgttgcgggttgttttgagcacaggttaagcactgtttacaaatggctcaagtgatggcagagagccgtggcacatagaaatggcattttagtaacgtttctagtgccattttttccatgagttccttgatgaatttgctttacaaacatatgagcttaaatctttgaaatggctaatctcccatcgaagaatttccaccaccctccttgaatatatttttcagcctcctgggcaaaccagggtctttcatttggtgtataacttgggttttcttggagaggaggttctgggaggagagccatagctaaggcttcctctgatttaaaaaaaaaaaaaaatgcagcgtaattattgctatctgttttgcctctctgtctgcctttttgtttcctttggtttcccgtgttcctgccttttggtgccctctgcagtgtattacagctactttttctggagcccatacagcctttaggagctgtagaatcttttcgttatactttatttttttttctccagctgttgaaagcgttttttatttgcttttttttttttatagctccatgaatatgcagtgtggtaaaatcaaatttaaagccagtgtaaatattgaccttcttatcttttgccaacaacagtgctcttgttagggctattaattttgctttttgagctgatgttttgacattcgggtttctgaggggttggtttataaaatttatccgactggaggataccttatctgtggttttgacgcagttatggagaggagctcccggtgtgatgggaagcagagtagccagatttaggtgtttacttttttttgagacagaatcacactctgtgatctcagctcactacaacctccacctcctgcctcagcctcccaagtagctggggctacaagcacgtgccaccacaccaagctaatttttgcatttttagtagagacggggtttcactatgttgaccaggctggtctcgaactcctgaccttgtgactttccctcctcggcctcccgaagtcctggaattccaggaatgagccaccacacccagcctggatgtttactgtttttaaaataatgtaagagtttttacatagaagcccttagtactgagtcattcttgggtttgataaccaatgatgccctctttgatccattgaagttataactgagtgtggcacctggatggttagctgctgtcccagagttaatttactagcctcttgtgttaacaaaacagtggcagctaaggttttaaagcaagaaggctttcctagcaccacggagtctagttgtttggataaatatgccactgggtgatgctgtgatcctataacttagagtcagaaccccgtagcaatttccttttgttcttgaatatatagaaagaaaggtttacttatatctggtagtcctaaggctggggcctgaattacagcctctttgatttgtttgaatgctatttcctgattagtttcaggggttggaagcgcacaaatggactgctattccttatacctaagctggcattccttgtggcttactatgaaaactagacatttaacctcttcatggcaaatttaggctttctttttaaatacttagtaacctgctttcaataagagatggaggtggtctcgggttttatgataacagtcctctcgggttggggctgccaaaagaaggttgtccatgtactgtaacaaggtgcacttatcatttggcatggtataggccttaaggtctgaggccaacgcttccccaaagattgtgggagagtttttaaacccttgcaggagcctagtccaggtgagctgtgtagcttctttgtcccactgaaatgcaaagataggctgactaactggtgccaagcagatacaaaagaaagcatccttcaagactgtaaaccaggcagtacttgctggaatgagttccattaaagcatacaggttgggtaccactggatggataggtaacatggcttggttcacagcacacaagttctgcactggtctatacttattagaccctggtcctggcagcagtttttgtacaggcaaaagtggaatattgtacggcaactgggactggactaaaatcctatgtttatggagccactctaagtgtttgtaagcgccctgtacagccttttgggggaactgggtactgatgaacccgaacaggagttgctcctggtattaattttactactactgctgcatgatttacagctaacacaggtcggttgtcctcatcccacactccaggaatttctttaactaactgaaataataatttttcttttacatagaagcccttagtactgagtcattcttgggtttgataaccaatgatgccctcattggttatgagggcatatgaggttgcattggtgcttgcgatttatttttataaagtctccactcctcaacctgtgggatggtaagggttaacaccatggcctttgggtgagtcagatttaaagtcatatctccctgtgggccaaaagtaatttgtgcttgcagtttttggagtaggtctttttctaacaagggaactgaacaattttggaggtacagaaaatcatgctggacttctcgtccttctataacacacctctttgaccaacagaacagcctcttctttgagacaccagtagcctctacaatcgttgtatagttcttggatagtggccctatgggtcaagttactacagagtattcagccccagtatctaccataaagtccattaattggcctcccaacttctaatgcaaccataggctcctggaggcccaatgagaaggagcccagtttgtcctagttctcatatcttttagcccctgccagcccgattagatcagtattgcattgctttagggtttggcagcccctcaccgatggcctctctgtcacacggccttagccatttccctcattgccttctggacattcatctttacagtgtcctttctttttgcatcatgcacattgatccttctctaaccttggttggctctcgaatccctgtctaacttgacctcttccaggtccatgtctgcatcctctcacattaatagtttctctctctatgagggctgctgcttatagattgagtttttttttttttttttttttttgagacggattttcgctcttgttgcccaggctggagtgcaatgacatgatcttggctcactgcaacctccgcctctcaggttcaagtgattctcctgcctcagcctcccaagtagctgtgattacaggcatgcaccacaatgcctggctaatttttgtatttttttagtagagacggggttaagccatgttagtcaggctggtctcaaactcccaaactcaggtgatccacccgcctcggcctcccaaagtgctgggattacaggcatgagccaccgtgcccggccttgattggctttttttaaagcctctgttcgacttccttctttgccccctggtcatggttaacatacactttggtggctacttttataagctgggtggcattcatggctgcaaaacctcccagtgtctgaagattttgcttaatattactgtgggcctgtcctacaaatgatgtatttaccatatgctgattttcagcagcctcagggttaaacggggttaaaagctggtatgcctcacagagtccttcataaaactggctagggatcttacttccctgaagcacctctgagatctttcttatattgatagccttttttccaccatcccttagcctttgcataagtgccttttggtacctctgcaaatgctgaagctgagtcgcatcttctgagtcccagttgggattttggtctgggaactggccctgagcatatgcctgagcattttcttttttttttttgagatggagtctcgctctgtcacccaggctagagtgcactggcaccatctcggctcactgcaagctctgcctcccaggttcacaccattctcctgcctcagcctcccaagtagctgggactacaggcacccgccaccacgcccagctaatttttttgtatttttagtagagacaaggtttcaccatgttagccaggatggtctcgatctcctgacctcgtgatccacctgtctcagcctcccaaagtgctgggattacaggcatgagccaccgcagccagcctgcctatttactgcatctgctcgtgcatgggcttctagccagcagagagctgtctaggttactatcctgtgctccttagtgttatacagcatgagaagcagctgcctgcagtctggtcaggttggattctgtgtcagaaagatggactgcatcagatctataagagcttggggcttctccatataggagggagtatggtgtttccagtttaagagatcagtggttgaaaagggctgacagatgaaagtccattcccacccttggacttggccttggttatcttaataaatgggtcctcgtgtctccctgagaggcatttgcatatctcaagcacaaccagatctgagatggcctgcttgactatcttgacttctttccctgacctctcaagtctccagtctttcatttcagggtgagagttggggtgtgctagcacctgaatctggttcccagggggctgctggccttggtaaagtggggtaggctgtgacatatggagtaggaatctttattccctctggtggctcctgcaaaactggcttttcttgctccctctgggccttcttctttaactctgtatctgctagcgaagctgctcttactttcattttttggcttggcttaggccacaagtgttttgcaataagctgctaaacagggctggattcaggctggtcttgtttgtgctagatttaaccatgagtcaatataaggaaactgatctggatgccgaggctgtcctctgacctgtcaccaccttaaatacacggccaattattttcctatctatagttccttcaatcagtcatccaacactaaaagaaggcagttctaattcacagagagttcttaacctctggggggttagcttaactccataattccctgtaaaaccttctttaaagttctgtaacatgcgctccaatggagtggactttgatgactttactcccatttcctccctttactacgcagcacacccactcttccttttgcctcagactgaccagaccatccccaattacgggagttttcagatgctgcttggctttggagaggtccttattcccaccacaactctgagctgtggggcaactcctattggacgtatacagttcaccactagtccagggcagccccatactttgctcggagcacacagtcaatgctaagagatctgtgactccccacgtcactccttgcattgtattctcctggaaccatctttcacacacttttatatacgtccctgttcccagttcctgtgttcctaattggggtggcaagcaactctcaccacctccagtttcctttacctaaccaactaagcaagccactctcgcatcctgtgttggttgaggtgtgagattcttctgaattggcaagcccctcttgccgccccaagcctctctgggtcggactactagttacaccccgggaggtgatcaggctccccttccgtccttacgggacgggtcctgccttggtccccaataacttaccgtggttcctaaagtgcgctatttctggaatcatcctgtagcccttctcaggctccgttgcactgctgggtagggatgccgggtcatgggagagctgatttcccctccgggctgaagttctcccggcggtgcctgggtcccaggtttcccttgaatcaaggctccagccccgattttcccttgaatccggggctccagccccgatttcaaggcaaaggagacagtctctgctcctggctggctcgccaagaaatgtgggacacagaggactagagagaccagtatgagtcaataaaggaggatatttattttaaggtatgctctggctcagtgaattcacatccaaaaagctgagccttgaacaaagactgagtgagattttaataagtaaacttacagaagcaaaacaaaggcagttaattatataatgaccagtttatgtaatttatagcataactgaattcttggcataacttgtggcctttaatagctggtggccttgtagctgcattgaaagaaaaaacaagaactggctaaatacagacgtttgtttttctttgtttccttcacccttgcttcggaggggagtgtctggagcctatttctttggtttcaacttctcaaacagcattatcttataactgtccttgaagtgagcttgctaggcaaagaaaaacttgttcttttcttttcaactcttgccttgccacattctgggctttggcttttacttttcttgaaataaataaatgcagtaattatctcattgagaggcttctgatcaaattgatcagcaagtcaaactctctgcttaatcagcagtaactttattttcactcttcaaaggcattttacctgcctgaaatgcaaaggggcagttcaagtgactgtgctgagctggtcctctccagtgtcagtctattcacattcacacaggtgatcttctggtgtaagggggtgcacttcaacagcattatcacagcaatgtggaacagatgtaacagaataaaagaggaatcactgccttccaggaaaaggagttaatcttattcattttgtgtatgagtacgtggagaataaagttacagagaacgctttacattagtagtgcagtgcagatcctatgcaatcttcttgtttgtcaaacataccctgaatggttttattaagtactatgtttctggatccaccccttatttgattctgataatttctactttatcaatttaaatattcactcaacatcatccagatttctgtccttgatgcttaagtcctcagacataaaatattattgataaaaacatgagcctttattttactacagagcatttctttagcttggaaagccaaatttggtcaaaatgaaatataacaatgaatataaatcattttggaagtgaattcaaattatttaaaatattaaatttgatagatatatgtgtcagaatttttaaaaaatttgaatacataaagctgaaacttgaaaaatatacatacatgcttttaagacaaatcactttaaaagcatgatcatttaagtttttaatttagcagttttggctatgttgaaaatgtaaatatgaaatatcacataaaataatgttaagaaaacaaaacaaagcacaatagtcctgaaggctgttgtgagacctcggttcttagtttcaaaaatttaaacgagacgcaaaaaaatgaggatgcagcatagatagatttatcgcaaagtagaaacactattttaaaagtgcggtgcaaaacacccctgagagaaaagcaattcaggatgggctgcttataagaatgagacagcaaagactggaaatagagagactccatttatcggagtcttacataattatttacaaagagttagaaagtggtgttattagtaagcatgttctgggtggtcctcttggtgcacatacacagtggctgtacatgcttgtttatatgtcacatatctcattagcatatgtcacatatctaattagcatctcattagcaaaaactccactcacgtgtgtgttttttagtattacgatgagtaaaaggtcagaggacaagtaaaatcaaaatgtgcatgctctttatgggggaatatccctactagagagctttgcttgaatgagctgaaacgcaatgcaaatgttggggtttattgtgttgataatatgctatcaccaggaaatcgccatggctgctgcatcctgaggacatggtgaccttcttggctagctagccagcttcaataatacttatcttagtttattttcaactatcaactctgagacaaagatttacctgttatgtcaatattgtcaaaagtgagaaaatgacaattttaaaatcaaacatatttgagcttgatttgggtcactagctgtgtacccaggagaaattattttacatccctggagcttcagtcaatatgtatgcattggtgtatgtttgtttttttggtgtaggtttttgtccgtttacatttttaaagatattttttcctactttatgctgatgttaagctacacaaaacttaccaagagctctattttactacttttttttttttttttttttagtatttattgatcattcttgggtgtttctcagagacggggatttggcagggtcataggacagcagtggagggaaggtcagcagataaacatgtgaacaagggtctgtggttttcctaggcaggggaccctgcggccttccacagtgtttgtgtccctgggtacttgagattagggagtggtgatgactcttaacaagtatgctgccttcaagcatctgtttcacaaagcacatcttgcaccgcccttaatccatttaaccctgagtggacacagcacatgtttcagagagcacggggtggggggtggggggtaaggttatagattaacagcatcccaaggcagaaaaatttttcttagtaccgaacaaaatggagtctcccatgtctacttctttctacacagacacagcaacaatctgatctctctttccttccccacatttcccccttttctattcgacaaaaccgccattgtcatcatggcccgttctcaatgagctgttgggtacacctcctagacggggtggcggccgggcagaggggctcctcacttcccagacggggtggccgggcagaggcacccccccacctccctcctggacggggcggatggctgggcgggggctgccccccacctcccggacggggcggctgccgggcggagacgctcctcacttcccaggcggggcggctgccgggcggaggggctcctcacttctcagacggggcggccaggcagagacgctcctcacctcccagacggggtggcggtcgggcagagacagacactcctcagatcccagacggggttgtggccgggcagaggcgctcctcacatcccagacggggcagcggggcagaggcgctccccacatctcagacgatgggtggctgggcagagacgctcctcacttcctagatgggatggcggccgggaagaggcgctcctcacttcccagactgggcagccgggcagaggggctcctcacatcccagatgatggacggccaggcaaagacgctcctcacttcccagacagggtggcagccgggcagaggctgcaatctgggcattttgggaggccaaggcaggtggctgggaggtggaggttgtagcgagctgagatcacgccactgcactccagcctgggcaagattgagcactgagtgagcgagactccgtctgcaatcccggcacctcgggacgcccgggcaggcagatcactcgcggtcaggagctggagaccagcctggccaacatggcgaaaccccgtctccaccaaaaaatacaaaaaccagtcaggcgtggcggcatgcgcctgcaatcccaggcactcggcaggctgaggcaggagaatcaggcagggatgttgcagtgagccgagatggcggcagcacagtccagcctcggcttggcatccgtattttactacatttttcaaccaaaaggttaaatacttaaatattgaaagtgacattctggattatccttttccacgcagactacattgcagtttttccttatgtggtgcaaggttataaaaatgccattcagttgatttcttaagtaaaagtagaacgtgttttctcagacagtagcatgagaatttttgacacactaccattagacataatgaaagcaaatgaataaatgtgttgaaatttgtctttattcacgagatcattagaggctaagtcatggcaacacgtgtagttcaattcaattttttttgtgtaaaattttgttgagctgcatccatctgcatatgtaacactaatttggtaacagcttctttatactaagccagaattaatttgtcctcatggttttgttttaaatgtgtgagctgtattatatcacatttgaacaagtaatatagagaatataaatttagtttagagaaagaaaagtacaggcacactaaaaatgaattagaatctggcagctgacactgattaacaggttgagcaaattcaactagacctaaatctctgtaaacaattttgaaagacagaattctaactaaaaacatcttcaacaacataataaacctacgagattaaaaaaaaaagttggtttacccatcatcaatcaatactaggttaaattagaaaattgtgaacacatcatacaaaaagtaaaattactaaactatcctcagacttcatctgattaaaacaagacttctgggtatttgaaagcaccaaattattgatgaaaaatatctattctgaacagatccttgatcttatatacatattactactaagtaaaacctaatacagctttgatttctgaaatatttgtgaatgtctgtcactgcactcaaaaatcaagaaattatttcatctgtctaaattttgaggaaaatatttgctattttaattgaatgccagtagtgtgtgaattcatgtagtgtggcaaaccacccatttctttagtattctgctatttttataaaataagccagaatttgtggagacatttgtaaacaaaaaatctttcctaaaagttagacatcagaaaatagcgatattaatgttacgttatatacacagtttgctaaaccctaccataatctgtaaagtttttgtgtacaacaatcttagattaccgaaaacaaaataaaatttttctttttttttttttttcagacagagtctcactctgtcaccaggctggagtgcaatggtgtgatctcggctcacgtcaacctctgactcccaggttcaagccgttctcttgcctcagcctccctagtagctgggattacaggtgcctgccaccacgcccacctaattttttgtatttttagtagagacgaggtttcactatgttggccaggctggtctcaaactcctgacctcaggcaatccacccacctcagcctcccaaggttctgggattacaggagtgagccatcatgcccagctaatgaaatttctttcttatgttatgcttaacatatatacatatatatatccggacagacaggaactatgactgccactttaaaaaacaaatatttcagcacaatacaatgttttgtgtatgtacagaaggaaaaccaaactttgaagttttcaaatcataaacagaagcattatttgtgattctaagctttaaatatataaaacaaatatttattcttctttttattattatactttaagttctgggttacatgtgaagaacatcagttttattacatacgtgtacacatgtgccatggtggtttgctgcaaccatcaacccgtcacctacattaggtatttttcctgttatccctcccttagccccccagcacctgacaggccccagtgtgtgatgttcacctccctgtgtccatgtgttctcactgttcaactcccacttatgagtgagaacatgcagcgtttggttttctgatcttgtgctagtttgctgagaatgatggtttccagcttcatccatgtccctgcaaaggacatgaactcatccttttttacacctgcacagtattccacagtgtatatgtgccacattttctttacccagtctatcattgatggacatttgggttggtttcaagtctttgctattgtgaatagtgccacaataaacagacgtgtgcatgtgtctttatcatagaatgatttataatcctttaggtatatactcagtaatggaattggtcaaatgttatttctagttctagatccttgaggaattgccacactgttttccacaatggttgaactaatttacactcccaacagtgtaaaagtgttcctatttctccatatccactccagcactgttgtttcctgactttttaatgattgccattctaacgggtgtgacatggtatctcattgtggttttgatttgcatttctctaatgaccagtgatgagcattttttcatgtgtctgttggctgcataaatgttttcttttgagaagtgtctgtccatatctttgcccattttttgatggggcagtttgtttgtttcttgtaaactgtttaaattctttgtagattctagatattagccttttgtcagatggatagattgcaagaattttctcccattctgtagttgcctgttcactctgatgagtttcttttgctgtgcagaagctatttaatttaattagatcccatttgtcaattttggcttttgttgccactgcttttggtgttttggacatgaaggctttgcccatgcctatgtcctgaatggtactgcccaggttttcttctaggatttttatggtcttaggtcttacatttaagtctttgatacatcttgagttgatttttgtaaaacgggtaagaaaggggtccagtttcaattttctacatatggctagccagttttcccaacaccatttattaaatagggaatctttttctcattgcttgtgtgtgtcaggtttgtcaaagatcagattgttgtagccgtgtggtggtatttctgaggcctctgctctgttccattggtatatatctctgttttgaattctgcatttccactttacaaatcccacagttctgctatttcacagtaggatttgacactaaataagtattttttgatggtgacagagtgatatcaatttctgaggccctgttctgttccactggtctacatatctgtttggtaccagtaccatgctgttttggttcctgtagccttgtagtatagtttgaagccaggtagcctgatgtttccagctttgttcttcttgcccagtattgtcttggttgtgcaggctcttttttggttccatatgaagtttaaagtagttttttccaattctgtgaagaaaatcaatggtagcttaatgaggatagcattgaatctataaaattactttgggcactatggccattttcacgatattgattcttcctatccatgagcatggaatgctttcccatttgtttgtctcttctcatttccttgagcagtggtttgtagttctccttgaagaggtccttcatgtcccttgtaagctgtattttcctaggtattttattctcttactagcaattgtgagtgggagttcactcatgatttggctctctgtttgtctgttattaatgtataggaatgcttgtgattttttgcacattgattttgtattctgagactgctgaagttgcttatcagcttaaggaggttttgggctgagaagatggggttttctaaatatgcaatcatgtcatctgcaaacagagacaatttgacttcctctcttcctattttgatacgctgtattgctttcccttgcctgattgccctggccagaacttccaatactgtgttgaataggagtggtgacagagggcatccttgccttgtgccagttttcaaaggaccgtttattcatcttaatttaaaatacagtggtttttgaacaattcaagtagcattagactattaaaaacatcatgagccacacaagtgtcaactgcattttcagaattatgagaacttagaaaaagtaaaccaaacacctttagtttagttaaaaacatactaaactactttgtatttgcccttgtgatgagaatcatctttattcattttggaacaaacaggaaatgctgtggtggtaacttgctggtggtgactgtgatgatatttactgtcttagggatgatgggattcagtggaccagaatcgtcaggaccttactatggtcactgctgtttaattctcttctgtcattcattttccagactccttcatcaatttcatttctatcattgaatgaatgattttgcactgctttagcatctgcctttgatttctgctaattttctttgttcatttttcttgtccatctctggtggctgctttgctattcaactttgaggagtttgtgctgcttcaccctcagctgctccaacagtccatccatttgcctcaagctctctggcagggtctccaggttcttctgtgtctggtgtctgagatttatcagcaggagcttgttttcaatgaccacagctaccgccgtctcctgccagtggggtggtttctacaagagccaaagtgcccatgcccggagacaccttggttataaaccttggtcatggcccagtttggtgcgcaaaaacccaatgtcaaccagagcatttcgcacagatgggtgagctttccttggcacatggggcagttcccccatcatctctatgctgccacctccccttacacaaaggatggtgtaggggcctgaagacaccgtggaagagtccagggagttaggaggggctgggccaggcagcctcaggcccagaggatggcagcaccccctcacacctgagcagacatcagccactgccacctcggggaggacagaggagcccaggctcccccagccagcctcactctaaaccagcagaggaaaaaattattgttattattttttaaagtgagatggagtcccgctctgtcacccaggctggagtgcagtggcacaatctaggctcactgcaacctctgcttcccgggttcaagtgattctcctgccttgcctcccaagcaactgggactacagccgtccaccaccacgcctggctaatttttgtacttttagtagagatgaggtttcaccatattggccaggctggtctcgaactcctgaccttgtgatcaccccgactcagcctcccaaattgctggggttacaggcatgagccaccccgcctggctgaaaaaaaattattttctaaaaaacaaaaaatagtataaaaaataatatgcagaagaacttgcatatctaacctgatcaaatttttattctttttctttttatttctgccttttcctcttaaattgtgctctcctgaagtcatgttccatcctcatgtgggaatttaaaagtaattataatggtcacaaatttagaaactaaaaaattttaatatatttttgcccacaagtcctggtttaacattaaactttcaatagtgctttctgaattctacactttattttctatttgattctgttaactaaaatataggaagtaaaaatataatcttgatttgcagtttcagtttacaaagaatatgtattcattcttttaacctaaatgtgtgttgagcacacatgatatgccaacaatttggtagccttagaaaatagaagccaggcagggtggctcatgcctgtaatcccagaattttgagaggccaaggtgggaggatcacctgaggtcaggtgttcaagaccagcctgacggggtaaaaccccgtctctactaaaaatacaaaaattagctggttgtggtggggggcacctgtaatcccagctacttggggggctgaggcaggagtatcgcttgaacccaggaggtggatgttgtagtgagccaagaccatgccattgcactccagcctggcaacagagtgacactccgtctcaaaaaaaaaaaaaaaaaagatttaaacataatattgttttaaacaattttatgtcattatatttaaaaaattagatacaattattatttttccagaaaggtatgtggcaaaaagtgactgaagaagaaataaaagagagcccaggtgtggtggctcacacatgtaatcccacgactttggaaggccaagttgggaaaatcacgaggtcaggagttcaagaccagcctggccaacatggttaaacgctgtccctactaaaaatacaaaaattagctaggcatggtggtgggcgactgtaaccctagctactcaggaggctgaggcagagaactgcttgaacccgggaggcggagtttgcagtgagccgagatcatgccactgcacttcagcctgggtgacagagcaagactccatctcaaaaaaaaaaggtaaataagaaatctaaaatttatgtttttaattttacaaaaataaaaaatacatctattataagagaacagcttgagccgggcatgctggtttatgcctgtaatcccaacgctttgggaggccaaggcaggtggatcacaaggtcaggggtttgagaccagcctggctaacatggtgaaaccccatctctactaaaaatacaaaaattagctgggcatggtggtgggcacctgggattacaggcatgagccaccacgcctggctgacatctgctattcttaactgctctataagcctgctgaatcacagggccatagagcaatcactgttgtttacatgctttttgtcaggcagttcttatgagcctgcaaatgttatattattcccaaccactgacatcaacatgcatttttttactttttattcaatagggaaaagccccacgtttttgcttccaaccatcacagtcataaagaaatagtcccagttccctggtaactctgctttcccacccctacatgagacagcctttgtgaggcacgcccccatggcttgccttgctcttgtttctggtgcaagtgtattaaacaccttttaatggcattcaactttcttttatgaattaagatccaagcaaaattcaaatcgtgttgctgtgctttgttatcagaaataatatggggttgggatgggtgtggtagctcatgcctgtaaccccagcaaagggtggtgggaggctgaggcaggtggatcacttgaggccaggggttcaagaccaacctggttaacacagcaaaaccccctctctactaaaaatacaaaaattagccaggtgtgctggtgggcaactgtaatcccagctacgtgggaggctgaggtacgagaatcacttgaacctgggaggtggaggttgcagcgagctgagattgcaccactgcactcctgcttaggcgacagtgcaagactctgtcccatttaaaaaaaaagtaattgacagtttcataaaaataatacttaatttgtaggctgatctaggaagcatggatatttcatattcattcctcaaatccataagcataaaattttttttatttatttgcattgtctctgattactttcagtaatgttttgtagttctttttttttatttatttatttgcattgtctctgattactttcagtaatgttttgtagttcttttttttttttttttgagacagagtttcactcttgctgcccaggctggagtgcaatggcgtgatctcggctcactgcaacctccgcctccgcctcccatgctcaagcgattctcctggcttagcctcccaagtagctgggattacaggcatatgccaccacgcccggctaattttgtgtttttagtagagacggggttaatccacgttggtctggctggtctcaaactcccaacacacttactccataattttcttacacctaaggtttgtctttagattaataaatatttaactctatgtaaatcaaaactaaaagtcttatgtgtttgcaggcagacaggccacatgttccaagaaaaatatataagaaatttgaaaaaatattaagaatttaacaatgaattttatttatactcatatataatttttattatgaccataaaaataaccctgtagtaaataacaatttaattgtacattttaaatttaaaaaaaagtgtagaattggattataaaacataggataaatgctacaggtgaaggatgcctcacttaatgctgatattattattatatattgtattcctgtattaaaacatgccatatattgcatagatactcatgcagccaccaaaattaaaataaatttaaatgattaaaaacagaataaaaatttacctacagaaacaatattctttaacttatttgcagttgaaagccactggcaaaaaaaaaaaatcactagagatgttaatctattatcttactaaacagtatattgttaccatcttttacctatacccttgagtaaggtgaaagaggttaaagtttgtggcataataacgcttcattgaatgcacaatagtatttaacatgttaaaaatgttgaattaaactattaacttcacacataatctaaaatttataaatgtactgcattttattatataaaagtacaatcaggccaggctcggtggctcatgcctgtaatcccagcactttgggaggccaaagtgggcagatcacctgaggttggcagttcaagaccagcctgaccaacatggagaaaccctgtttctactaaaaattcaaaattagccaggcatgggggcacatgcccgtaatcccagctactcaggaggctgaggcaggagaatcacttgaatctgggaggcagaggtcacagtgagccagagatcgtgccaatgcactccagcctgggcaccaagagcaaaactctgtctcagaaaaaattagtacaattagtacaataatatactactcatttaattttaaataaaattaaacatgttttcttctcatgataatgcagattactctgaacacctacctgatgcatcactcaatattataggttataagagcctctccacttagatttttattatgcatcttacattttaatgtctttacttttctatagaagaggtaataaacaacacccccctaataaaaaagaatgccttgccaggcatggtggctcacacctgtaatcacactttgggagactgaagcgggcagatcatgacgtcaggagtttgagaccagcctggccaacatggtgaaaccccatctttactaaaaatacaaaaattagctgggtgtggtggcaggcacctgtaatcccaactactcagtaggctgaggcaggagaatcacttgaaactggaaggcggagacggaagtgagccaagatcattccactgcactccagcctgggcaaaagagcgaaattccatctcaaaaaaacagaaaacaaaacaaaacaaaaagaatctctcacatctttgacgcagcaacaattgatcctatgctttcacatttgactccaataggaatgaagaaacagcaggaaataatttcagagttgaatgacatcattattcacttttcaaaaaatctgtatttttttcaagaaatatactttgaatgtaattataattctgcaaaaaaccttctgatcctctgaaagttacatacaaataatttttctgccaactttagttttagatttcctatactcagcactgatttagaatacgtgaagtgtgtcagtgccttatatatttctaccataaattctgatatttgcatagacttaattatggattaaatatttttttacatgtactgcatctgcaaaagcatactccagtatgaactctctgttgttttctaagctgtagtttttgaaaaagtgtttttccaaatttattacatttgcacaatttttccccgatggaactttgttccacagaaggaatctcagataatactttttaaaagccaaccccagacatggatttgtaccatcaaatacctgagttgggtgaatttatctcctcttgaggctccaagataaacctggggttcctgagtttgtcagaaagtgaccttcaggatttctgacctgtggtaagtaaaaatgtcatagtacagggaatatgtagacaagatttgaatccagttttcccgaggggcttttaattggctccataaatcaagtttgattccttaaaaaaggaacaccattccagtcaaagtgttggtaaaataaccagtttctccaattgtgtcctgttacttataaaaaccagattcttggcagggcgtggtggctcatgcctgtaatcacagcactttgggaggtcaagatgggtgaatcatgaggtcaagagatcaagaccatagtggccagcatggtgaaaccctatctctactaaaaatataaaaaatcagctgggcatggtggcgctcgcctgtagtcccagctacctgggaggccaaggcaggaggattgcttgaacccaggaggcagaggttgcagtgagccaagatcgggccaccacactctagcctggcaacagagtgagactctgtctcaaaaaataaataaataacacaacaaaacaaacaaaaaaaaacattcttaatgcacttatgcaaataaatgtattgccataagttaagaatactcacaaatagtttccaaattctagagaaatcaagtagagagaattaaatatgctttaaattttgttcacaggagtatactaacttgttaaaagctgtaaatagatcaaaaggtaggtttccttgactcagaaaacaaaagaaaggatcagcaacattttaagtaaaaagtcaaaaagatcagctggtctcggtggctcacgcctataatcccaacactttgggaggccaagcaggcagatcatgaggtcaggagtttggaccagcctgaccaacatggtgaaaccccgtctctactaaaaatacaaaacttagccaggtgtggtggcatgcatctgtaattcagctgagatcacaccactggactccagcctggaagaccgagtgaaaccccgactcaaaaaaagaaaaaaagattacttcagtcttctaatagttcaatgcatgcacttaatccttgttctgcttaatattcatgaacatttcagctctccatgagttctgaatttttttcctctactctgatgtcaccatctccaaagttatcagaaacttgcattcaagaccacctgttaagagttttatagctgattataaaaccaccttctaaagaggaccaaaacaatacaattgtctgtgaatgacaaaaagttttaaggcaaccaaagtcaaagatacaattgacaaggaaatttgttacctctgtggcaatatagcaattataattactgctaataatgtacactaagtcatataagaattataggagtttcccataattttagaacaaataccaataatatacttatacaaacacagcccaaaaaaaccaaacaccatttcatattcaacaacgttctctgtataatttttataagaaataagcaaaattatgtcatttttaaactttagggaacataatattttaaaggattaggtaagaaaaatacataatttataatttgattttggaaagtttgatggaactttgttccacagaaagaatctcagtcaaatatcaaagatttaaaacacctgatgtcacaggtcattgtaaaataagtcattaatttgaccaaagtaataaagatttcaaaaacaaaaaaagaaaaaaccttcattctttgggagacaagacttaattttccaaacaataatcttcaataaaacagcataaagccaattaaatttgtttttcaaaatgttatgaacaatctataaaattctaatcttgaccatgagatataacttctataagcctttattaaggagtcagttaatgcttcaagaaaaccttgttaatctaacactggggcccctattctggtcttgcattagtgtgcctttgacattaatgattaatgtatagaaaaactgaacttattttatctctcaaaatcagttcttacaatctcacatgcccacctcttttgtgatagtctctgggcctttaggagttgaagagctttaatttcatctcatctgcttcgaaggtggctcatggttgggctatcttcatctaggagagtattccaggccagaccctacttaacctaaaataattaaaaaggtcagaatttgaaaataatttatttaagttcaaatattaaggatagccaccaaataacagatttaagtagccctgaatatatattccaattagtagccattacaagccggttttttggaaacagtgcgaaggcagtttctaagttgtttaccaagaattgacattaaaattattggtaaattgattgggtattgattggctatatatatttgttttacatattttatgaaaaacgaaataatggttgagacagctagtcagaaacaaaatgtctttaaacaattgcccctgtgcacagatgtggggtaagattgaagtctcatactctcatctttctgggcttgataaattgtgcagaactcaaagagcggagactgctctgagctacttttctcaccgccttgctcaggacacataaaccccttaggtgggcagatcacctaaggtcaggagtttaaaaccagactggcaaagatggtaaaaccctgtctctactaaaaataaaaaaaggccgggcacagtggctcatgcctgtaatcccaacactttgaaaggctgatgcaggtagatcatgaggtcaggagttcaaggccagcctggccaagatggtaaaaccctgtctctattaaaaatacaaaaaattagctgggcatggtggcaggtgcctgtaatgccagctacttgggaggctgaagcacagaattgcttgaacccaggaggggaaggttgcagtgagctgagattgcgccactgcactccagcctgggtgacagagcgagactccatctcaaaaaaaaaaaaaaaaaaaaaaattagttgggcatggtagtgtgtgcctgtagtcccagctacttgggaggccaaggcaggagaattgtttgaatctgggaggcagaggttgcagggagccaagatcatgccactgcactccagcctgggtgacagagtgagactccatctcaaaaaaaaccaaaacaaacacaaaaaaattagtcgagcatggtagtatgtgcctgtagtcccagctacttaggaggccaaggcaggagaattgtttgaacctgggaggcagaggttgcagcgagccaagatcgtgccactgcactccaacctgggtgacatagtgagactgtctcaaaaaaagaaaaagaaaagcaatagttgtgttgtgggattcaggagactggagagaccaatgggtgagacaggagaatttcattaaggtggccactggctcagtggattcaaatccaaaaggctgagccccaaacaaagatgaggcttggcttttaagcatgcagtggcatgaaactcaggggcgggcttagcatcctacagaagcagaacgaaggcagttaatcaaacagtgaaaggtatgtgactcaaacatatctagtgacctctgctgggctgatcatcagactctcagcagatggtaactatcttaggtttgctcaggtatgtcttgtgaccttcgcagtgttgcactgatggaaaataggaacttacaaaatctttacaaacttacagaaatagttaaaaaatagttatgagagcagagcaaagaaatgctggtctgggaaggaatctcaagagagggaagctgataagaacttgttattctcatccctgttcctggagtccattccttctgggctctgcctggctttgcagataacattatcttagtcctcgcaggcccttggagtgagtcaacccagtacagggaggaacttaggtttttctcctttcaatttctgctttagttgaacacagaatattattttataaataacgacttagtaattatatagaaatcactaatcactttactaatacactgcatgtattggtgttttgttttgttttgagatggagcctcactctgttgcccaggctggagtacagtggcgtgatctcagctcactgcaacctccacctcccaggttcaagtgattctcctgcctcagcctcccaagtagctgggattaccggcacctgccaccacacccagctgatctgtatttttagtagatgttggccaggctagtctggaactcctgaccttaagtgagccactggtctcggcctcccaaagtgctgggattacacgtgtgagccaccatgcctggccagtttagaacttttacaaaatgaaataataaaactgaattaatttattttaaaacaatatgaacaagtataataaatattacaagtccccattcagataaagtttatttatttatttatttattttgagatggagtttcactctgtcacccaggctggagtgcagtggtgccatcttggctcactgcaacctccacctccccagctcaggtaattcccttctctcagcctcccgagtagctgggactacaggcacatgccatcacgctcagctaatttttgtatctttattagagatggggtttcaccatattggccatgctggtctcaaactcccaaccacaggtaatccacctgcctcagcctcccaaactgctgggattacaggcgtgagccacattgcccggcccattcagataaagttttattaactctatgaagatttgataaatggcaaatatgacattttcaaatagttttgtgatgaccagaaaaaataatctattaggtatttttataacaaaataagacaaaatgatactagtgatattattacaaaatattttcattatttcatatagtatatcataaatttaatcttaaaatattataaatatgctagaggttctcaaaactaaaaaaaaagcaaaataactaaatcattcaaaattggctttttttgttgttttaaaaataaagtttaaggctaggagcggtggctcatgcctgtaatcccagcactttgggaggccgaggcgggcggatcatgaggtcaggagctcgagaccatcctggctaacacagtgaaaccccgtctctactaaaaatacaaaaaaattagccaggtatggtggcgggcaactgtagtcccagctactccggaggctgaggcaggagaatggcgtgagccggggaggcggagcttgcagtgagccgagatcgtgccactgcactccagcctgggggacagagcgagactccgtctcaaaaaaaaaaaaaaaaaaaaaaaaaagtttaaggctaatcatatgggtaatacaactagacccctacctgtattaatacaattacaatttgacatgagatttgggtggggattcagagtcaaaccacatcattctgctcctggccctcacaacaaacctcatgtcctagtcacatttctttttttttttttaagatggagtctgactctgttgcccaggctggagtgcagtggtacaatctctgctcactgcaacttccacctcccgagttccagcaattctcccacctcagcctttcaagtagctgggattacaggcatgtgccaccatgcttggctaattttttgtatttagtagagatggggtttggccatgttggtcaggctggtcttgaatgcctgacctcaggtgatccacccacctcaccctcccaaaatcctgggattacaggtgtgagccaccatgcccagcctcctagtcacatttcaaaacacaatcatccattttcaacagtccctcaaaatcttttttttttttttttttttaaagacagagtctcactttgtcacccaagctgtagtgcaatggcatgatctcggctcaacacaacctccacttcccaggttcaagcaattctcctgcctcagcctcccaagtagctgggattacaggcacccaccaccatgcctggctaatttttgtatttttagtagagacagggtttcatcattttggccaggctggtcgcgaactcccgacctcaagtgatccgcctgcctcagcctcccaaagtgctgggattatacgagtgagccacggtgcctggcctgctcccccaaattcttaactcatttcagcataaacttaaaagtccagtccaaattctatctaagacaaggcaattctcttccacctatgagcctgtaaaatcaaaaacgacttagtcacttccaagatacaatggttatgcaggcattgggtaaattctcctgttccaaaagggagaaattggccaaagcaaatgagctccaggtcttatgcaactccaaaacccagaagggcagtcattaaatgttaaagctctaaaataattcccttcaactccatgtctcatatctaggccaccatgatgcaaggggtgagctcccaaggccttaggcagctccacccctgtaatctgcagagtacagcccctgcagctgctttcacaagctggcattgagtgcctatggcttttccatccaactcatataaacttacttaaccttaatcactttctaaaattgttgttttcaaatagaatcacattggaggttatggcttaccatatgaattttgatagaaaagtcagtctaaatcatgggaaataaccatatagaggtaatattttatatctcattggaattaatataaatatgtttttattttttattttttgaaacgtagtctcactgtgtcccacaagctgcagtgcagtggcgcaatctcacctcactgcaaactccgcctcccgggttcatgccattctcctgcctcagcctccagagcagctgagactacaagcacctaccaacacacccggcttattttctgtatttttagtagagacagggtttcactgtgctagccaggatggtcttgatctcctgacctcgtgatccgcccgcctcggcctcccaaagtgctgggattacaggcgtgagccaccgcgaccagctgaattaatataaatatgaagcagattctggtaagttaagatgtatattataaggcctagagaaacaagttagtaactttaaaaacatgaacaatcactatagaaatctaaatattacatggaaagtatctaatataaaagaaagcacttaagaaagactagcccgggcctggtggctcacgcctgtaatccagcactttgggaggctgaggcaggtggatcatgaggtcaagagttcaagaccagcctggccaagatggtgaaacctcatctctactaaaaatacaaaaattagctgggtttggtggcaggcgcctgtaatcccagctacttgggaggctgaggcagagaattgtttgaatccgggaagtagaggttgcggtgagccaagattgtgtcactgcactccagcctgggtgactgagtgagactgcatctcaaaaaaaaaagaaagactaaagacaattctaaaactagaaaaagactagagtgtggttgaggacacatggcccaataaagtttccaaaggaaaacctcaattcaaagatgtctgggcaaggcatttgtgcctgtggaagataaaaggagaaaaagcgggaaaatttttgacagtggaatgtaaggggattattttttacctttctctcatgtaaaatatttacaaatagaaaacaagtatttttaaaagtgtcatccagtgctctgtgacaaagtgattaattaaaatactgtttctgaaatgtacaataaaggacaaaaatagttgataatgttgtgaattgaaggggagaagttggctttggggaatgttggaaagaaactgggaatttaagattttactgcaagcctggcaaggattttactggcaaggctgaacaggacagagtagtggatttgagaccctgcttgccacacatgtggaaaatacagggtgacaccagtgcgtctgattaaagtcaaaataattaaatagcaatatttggactgaagtggcgttagtggtctaggttcctatgtaacaacaacaacaacaataaaatctagctcaaatgtattttttgtaagttactaccttaagagaaaacaaaattcaggtttaatcaaccacaaatctccaattaatctgattacataacgaaagaattttctcctggacactgcaaatggactacctaactgtacccaatcgattaatttgctttgcttcatcacacaccttatagaagccttttcttcaagaccctctggtagccccaaaaccacaaacgtcgggcgcagtggctcacgcctgtaatcccaacactttgggtggcccaggcaggcggatcatctgaggttgggagttcgagaccaccctgaccaacatggagaaacccccgtctctactaaaaatcaaaagtagccgagcgtggtggcgcatgcctgcaatcccagctaagtaggaggctgaagcaggagaatcgcttgaactcgggaggcggaggttgcggtgagcctagatcgtgccattgcgctccagcctgcgcaacaacagcgaaactcccatctcaaaacaaaacaaaagcccccacaaaccatgtctggggactgtcccattgattaatcactgtttgtgcatactaagtcttttttttttttttttttttttttttttttgagacggagtctcgctctgtcgcccaggctggagctcagtggagcgatcttggctcattgcagcctccgcctcccgtattcaagcgattctcctgcctcagcctcccgaggagctgagattacaggcatgccacgcctggctaattttttttgtacttttagtagagaccgggtttctccatgttggtcaggccggtcaggaactcccgacctcaggtaatccgcccacctcggcctcccaaagtgttgggattacaggcgtgaaccaccgcgcccggccatattaactctctaatggtgcttcagtttatttttgaacagggtaaagtaggaactggggaccccacagaccgcagctccttccacgcaggagacccgcacaaccagtcggagtctttccctgatgacctcacaacctggggaagatgacgggctgcgggcgcagagctgcgcaaagagggctacaggctggggctaaagccgctgtgctgaaacggtaaaggacgccccggggtccctgcaccggaggagagtgagggctgagctgcggggcactcaggctcacaagaccgtcccgccaccgccatttctggcgcgtcccaaagaggcctcccccgtctccaaacgccctgccccgcacactcaccttttctcggcttcaggaatgtcctggagtctatgaatcttccagcaccatcagttcaccgcgtgatggaggctgaggctgtggccgaatcaccgagacccttggaaagaagacacagggcagtgaagagctaacctcgagctctggctggagcaagagacaaaggccccgccaggtaccgggagccaccccttcctctctgactgtgaacctgattggacagttcccaccccagcgcccttaatggatagagctccaggctccgcgccctcaggccttgagtgacagaagacgcgatcagaccttgcactgaataccgcgagcgtgacaggctcttggctccagtcatttcaggaagggctatctctgggttgggcccacatgtgcccaggggttattttaaatcttgtgtataaggttatgtccatttataaattttattcatacacacatatatgttgttcacaaatggaaacactataataacaattattttaaaatttaacatttcataagctttctggcctttagtcttttgagtaggcaacctgggattttaaaagaaaaacagggccgggagtggtggcaccaagaagaaaaaaagtttatagaatctcaaaaagaaataagaaaaaggcggggcatggtggctcacgcctgtaattccggcactttgggagaccgaggcgggcagatcacctgaggtcgggagttcgacaccagcctggccaacatggtgaaaccccgtctctactaaaaatacaaaaattagccaggcgtggtggcaggcgccttaatcccagctacttgggaggcagaagcaggagaatcgtttgaacccgggaggcggaggttgcagtgagccgagatcgagccattgcactcaagcctgggggacaagagtgagacttctctcaaaaaaaaaaaaaaaaagaaaaagaaaaaaaactctttaacttaaacacacacacaacttcagagaaaacgtatctgagaatgtgaaacacccagcattcatagcctggctgattactgtcagtatctcccctttactaagccggtctttaaatgctggattagatggctgttgtataaatcctcagatatcacttaaaaaaaaaaatcacagggcatagagaaaagacaggaaatatgtcccacttgaaggagcaaaataatatccagaaattgaatcttaagaaatgaagtttttgcatatctgataaagaattcaaaatatttggccgggcacggtggctcatgcctgtaatcccagcactttgggaggctgaggcaggtggatcacaaggtcaggagttcgagaccagcctggccaatgtggtgaaacctggtctctactaaaaatacaaaataataggccgggcgtggtggctcacgcctgtaattccagcactttgggaggccaaggtgggcagatcacgaggtcaggagatcgagaccatcctgactaatatggtgaaacctcgtctctactgaaaaaaaatacaaaaaattagccgggtgtggtggcaggcgcctgtagtcccagctacttggagggtgaggcaggagaatggcgtgaacctgggaggtggagcttgcagtgagcccagatcgcaccaccgcactccagcctgggcgacagagcgagacttccatctcaaaataaataaataaataataatcatcatcatcttagaatgctcaatgaacaaaaataaaacacaaatagacaactaaatgagatttagaaataatgagcgaaatatcaaagatataaaaacttttttaaatttttaattaatttattttttttagatggactctcgctctgttgcccaggctggagtgcaatggtgcgatctcagctcactgcaacctccgcttcccgggttcaagtgattctcctgcctcagcctcccgagtagctgggattacaggcacctgccactgcgcctggcaatttttgtatttttagtagagaaagggtttcaccatcttggccaggctggtcttgaactcctgaccttgtgatccacctgccacggcctcccaaagtgctgggattacaggcatgagccaccatgcccagccagcaggcaggttttcttgtagacggaatgaaagcaaggaaagctggaatgagctcagccctatcaggcaccctaaaggctgcctggggttgcctgcaaggccatctagccttctgcttcctggcaggctggtcaagcacttattctggtctctttgagactttgatttcctggaaggagagggccctcctttccactggactgagtggccagggccatccagcttcccaccctccactaacaaccatggggtgccctcctgagcacacactgcccaattatggcccttcttaggcaggagctcatttgtcttacactttcagcctgctggggcttagaagttatcagtgctgttattaagatagagaaatgaggggggaaagttgctttaaaaatcttccataatcttattatggaaatcaccagcgcagatgccagcacaggtggggctcctgaggatgctgggggagagttcccagcctgtcctggcagccggtccttgccagggatggctcatgccccagctccagagagaagcaggtagacatctctgcaaggagctgcgggctgcagctcaggacagccaagccccactggtggtggagtggggctacatcccatcaggctgtgtctcttccacagcagacccttggagccaggaggtgatttacagtgtgtgcaaggcagtaagctccatcagctgcatggccttcagcactcacttcaacattcacttcaactctgatatctcgccacagaagcagtggggactggcctgtgcagaagccctgaaagtgggacagagcctcatgtggccgggcggcaggtggggcaaggaggggttctgagtcctcggtgctggttggcctgtctgcccatctgagcactgctccctgggagtgtgctctgcaggcctcctaaaggagggctgtgagctcatcactgaggccctgagcacctccttgctcctccccactacattaccggtgactatgctgaggtgggcctcgagcaccctctgggctgtgtcatcaaacgtctttggacctggcctggcaaatgagggatggcaaatgaggagtctggagtttcattgtcaccctctatggtagcaggaaatgggagagtccaggcctgcaggactggaaccctatcgagggagttaagaggctgttcacttcccctccgggccccatgtggaggagtggatggagtctagggagacactggggagtcacttgttttgtctgggcttcccctagttccaccctttgttaaccatttccttgggagagttcaggaaactcctgtgctctagtgaggcgggacctcccctcacagggtattggtgaggaggcgttctgagactctgagtgagaagctaccacagtgcctgacaagtacctgtgggagctgtcatcctctgtaaccaccatgtggccttgtagtgttcaggctgcctgtcctgtcctaaggcttggtggggcttttggggggtcagctgctttagggtcccactctctcctcaaagtggctgtttttgtgtttgtttgtttatgggttttaaaacacttaatatttcatttatagtagtttcaggcttgcatgtgtgtatttgtatagattttattagaaagaaaaggacttaagacaacatttttagaaggtctccgtggcgcatagagttccatgtcacaacagctgatgttgacctccttctgttgcctttgtgcaaagtataaatagaaagtgcaagccagaggtgccgaggctcagtgtctagagctgagccacttgggcttgcttgctggcctgcagccacgtggactctgggtgtgaggtgttgcccatcctggatcaacagcccccacccctctccccaggtcctgagtaaccaacacaaggcagtgctaatgagcaggtgagaaatggacatcgagcaccccaataccacccaggaagatttgaatggcatttggactcaggctgtgtgggggtaggggctgtgtgggggtaggggcttgtcatggtgccacccacagatgcccctgccctatgctgcttccccagcagccagctgtccatggccctgagcctgtcacaccatgcctgctacctcacgctgttcatgtttgatgaaaaccatcccaagatggtgctgctggatgtgagtgctggaaagggggcagcaccattgtcctaggagattatgagctgaccagatccctactgactgccccccaggacaagtgggggctggtgctgcattgaatgatgccccccccaggagatgtgtttgcattggctcaatgaatatacaatgcagaggcataaatgaagacatgtgaatggtgtatgtggacatcagcttgcagctgggaaaaaggtgcctctcaggtccctcattcttcccagcaactgtagaatgtgtccatgccaatgagtgtatagatctgtccttcttaacttgtacacaactccaggtcagttccgagtgaatgacatgcagatgggatttctcgagtcatttgtatgcttcatattatggctgctgcttttgctgccactacccccagacccaacctggtttgaagttcaggctttaagtaaaaaagatcgagggcctccttgtgttctgggatggaaagtcagagacctgtggtagggctagggttttgggtacactttagttttgtggcaggatgagaactgcagtgattataattgtgattggcctggcctgattgtaactctgggtgacagggagggagtcagcagtggtggtcccccagacatccatgtgcctaggcctggcctgcctgccctcagtaccagcaaaaaggcaacaccacaggctctgacttgcctccctactccctgcaccccagatgggaataccttggaggctacaatctgaatgtattattctccctgtcttaaccagacctccctaacacacactgagggtagagtaggtttggggcctggggagaaccagagctgaatcatgaatcccgggggaatgttaaagatacaggagtggttgtcaccgctctgttgagcccagcttcctacctggtcctggccacacagccccttaaacggagactagctctgggggtagttagggaccctataggcccaggctgctctctgtccccacctgccggtgctacttctcttgcctactgtcagagccctaacatggagaaggaggttgccaccctgtgagcctgagggagctgtgtctgactggggcttctgcctgggattttgcaaaaagatacctatgaatatggtttgcctagatatcttgtttttggttttttgtttttttttttttttggagacggagtcttgctctgtgcccaggctggagtgcaatggcgtgatctcagctcactgcaagctctgcctccttgggttcacgccattctcctgcctcagcctccccagtagctgggactacaggtgcctgccaccacgcccggctaatttttttttttttttttgtatttttagtagagacggggtttcactgtgttagccaggatggtctcgatctcctgacctcgtgatccgcctgcccagcctcccaaagtgctgggattataggtgtgagccaccgcgcccggccgatatcttgttttaaagggagtggccataagctagcaagtggagcatccccaccactgattaataacattttcttgtttttaacccatcatattttcatatcacattagaataaagtaagtttttataaactactgctccagcctcacccgtgtgttttgtaacccagtctgatttgattgtgaggactgttgtcagaaatgttgctaagagagaaatatgtataaattagatcatatttaaggttatgcttataatgccacttgagtgggaagtaagagtgtggagtcacagggactcagctggggtttgcccacaccacttactaggctcatgaaagtgtggcacaggtgaatatcacctgtcattggtgacagaagaaaaaaggctaaggccaggcgcagtgcctcaagcctgtaatcccagcactttgggaggtcgtggtgggctgatcacctcgatcagtagttcaagaccagcctggccaacatagtgaaatcctgtctctactaaaaatacaaaaattagcttggcatggtggtgtgagcctgtaatcccagctacttgggaggctgaggcaggaaaactgcttgaaccccagagatggagttgtagtgagccaagatcatgccactgcactccaacctgggcaacagagcaagcctacatctaagaaagaaagagagagaaaggaaggaaggaaggaaggaaggaaggaaggaaggaaggaaggaaggaaggaaggaagggagagagaaaggaatggaaaggaaaggaaaagaaaaaaagaaaagaaaaaatcctggagggaaggccaggggaggagagatgctaggctgtggggctgagcactgggcatgctggacctgttaggtcactgaacatctaactgccaaggcacttgcccttgtcaggtcagtcgaggtaaggaaattaggcagcactctccagaagtcccactgtactgggagaatggaggagggtctacaacttgccattctagggtaggttttagagcaagctgggctctcttggagagctaatgagatgggaggaaggcaatattccagacctgagggacagagcctgtgaagtaagagggggtatgtggaggtggcctgaccctataagagggggagttcacagttattatagctggtggctgttgctcagccatccctctccagagcagacacacacacacacacacacacacacacacacacacacgtgtatatttcactctgtcacccaggctggaatgcagtgactgaatcatgggttactgcagcctcaacctcttaggcttaagtgatctttccacctcagcctctcaagcagctgggactataggcatgcaacaccacacctggccaattagcctcatgtatagctaaatgccctttggagtgtttggagagtccttcatgtcttagaaattctgaaaaaacaaacaaacaaaaatattccaatcctaatgtctgttagttcctctgagccaagtgggaaaagatgtccttcaccttgaagttttaagtgatacccaaggatagccaccagtgtcttggccatggaagcctcctgcgtgcttcctgcccccagtttgatttgcagcctcatggttgtgttgtcctaaacatgctttcctctggccttgtccagtgaatatggttcacgtggggaacaccacttcttgagggcgacaccatgtaaagctgagaatggattgggtttaggtacattgtaactccttgtcacctgagaggcccatttttcctgattgattccttaagtgtattagtgctgtcagacacctttggacaaatcaaataacaaggggctgtagttttataaaggaaacaaagtctttaaatatcaaatcctctttttctcctccatgttttttttaggtgaaatatttcaatttttcttttctttctttctttttttttttgagacagagtttcgctcttgttttctaggctggagtgcggtggcatgatctcagctcactgcaacctctgcctcctgggtttaagtgattctcctgcctcaacctcccgagtagctggggttacgggcacgtgccaccatgccgggctaattttgtatttttagtagagacggggtttcaccatgttggccaggctggtctcaaactcctgacctcaggtgatatgcccacctaggcctaccaaagtactgggattataggcatgacccaccgtgcccggcctcaatttttctttaaaaatgggtaaatagtggtatgtcagcaggcttagtgtgagaattggcatgtggctgggagtggtggttcatgcctgtaatcccagcactatgggagggtgaggcaggcagataatttgaggtcaggagtttgagaccagactggccaacatggtgaaaccccatctctaccataaaatacaataattagccaggcatgatggtgggcacctgtagccccagctacttgggaggcggaggtaggagaatcgcttgaacccaggaggcagaggttgcagtgagcccagactgcaccactgcaccgcagcctgggctacacagtcagtcagaccctgtctcaaaaaaaaaaaaaaaaaagagagagagagagaattggcatgagctaggtgatggttcctgtgtggatgggcagtttttcaaaatagaaaaccaagtctcaccgagttgcaggagccacttttctttttttttttttttaatctatttttatttttttgagacagagttttacttttgtcgcccgggctggagtgtagtggtgtgatctcggctcactgcaacctccgactcccggtttcaagcgattctcctgtctcagcctcccgagtagctgagattacaggtgcccaccaccatgcccagctaatttttgtacttttagtaaagacaaggtttcaccatgttggcaagggtggtctcaaactcctgacctgaggcgattcccgcccaccttggcctcccaaaatgctggaattacaggtgtgagccaccgcacccagcccacactcacctttcttcacatacccccacccccaaggtctttcactttttttctgtgcttgaaatttttttaacatacatattatttttaaaaataaattatataacacacacacacactcagaggtctcactctgtcacccaggctggagtgcagtggctgaatcatgggttactgcactctcaaactcttaggctcaagtgatttttccacctcagcctctcaagtagctgggactataggcatgcaataccacacctggccaattttaaaatttttttgtagagactgaggcttaaaatgttgcccagactggtcttaaactcctgggcttaagtgatcatttcaccttggcctgcctcccaaagtgtttggataacaggtgtgagccatcaagcccaggcaaaaaaaaaaatttttttttttttttgatacagagtctcgctctattgctcaggctcgagtgcagctgcacgatctcggctcaccacaacctctgcctcccgggttcaagcaattctcctgtctcagcctcccaagtagctgggactacaggggcctgccaccatgcccagctaatttttgtatttttagtagagacggtgtttcactatgttggccaggctggtctcaaactcctgactttgtgatccgcccacctcagcctcccaaagtgctgggattacagacgtgagccaccatgcccggcctcaaaaatatatattttaaaatttttatttctttttgagacgaagtttttcccttgttgcccaggctggagtgcaatggcatgatctgggctcactgcaacctgtgccttccaggttcaagcgattgtcctgcctcagcctcctcagtagctgggattacaagcatgtgccaccacgcccggctattttttgtatttttagtagaggtggggtttcaccatgttgcccagggtggtcttgaactcctgacctcaggtgatccacccgcctcggcctccaaaagcgctgggattacaggcgtgagccgctgcagctggccctcaaaaatattttttaaagaactgttacaaccaaataatgagctatgatgtgccactgcactccagcctgggcaccagagtgagaccttgtctccaaaaacaaaacacaaaaacttataacaaaattgaactaataaggttgtgtcatctgtgtcccctccctaccctccaagctatcactgttaaatataatgggtattgagaaaactgttagatattattaaagaattcctatgtatcctccagttgaaaaggtgttctgatgtggctcaagtgctttctgacctctacctccagggtctaaactagcaaatcaaatcaggacacctacagaaaaccgttggccattttcttttctttctttcttttttttttttttgagacggagtttcactcttgttgcccaggctggagtgcaatggcgcgatctcggctcactgcaacctccgtctcccaggttcaagcaattctcctgcctcagcctcctgagtagctgggattacaggcgtgcaccaccacgcctggctaattgtatttttagtagagacggggtttctccatgttgaggctggtcttgaactcctgaccccaggtgatccgcccgcctcggcctcccaaagtgctgggattacaggcgtgagccacagcgcccagcctggccattttcaaatagaaaatgaaacacacccgttaatgaaagtaatccagtgattttcaaaaggagaagtcagactgagatgcagcgcagtcagggcacaattaccccaaggatagacgcttcacacaaaatgcctgaggagcctttctaagatgagcacatttggccaacgtaattcatgcttacccattctcagccccctctgcccacctcccccccgccccattcctaatggccatcccacgatgtggtcagcagtgtggtacagcatggtgagagaggggctcagggatgggatgaaggtttttcctgcattatcaaaatgattaaaaagttgttaaaaaggtgtccaaattttctttttaccctaaaataactactcagatgcattatacaagtagacccaggtaagggaaagagcaagcgcatttcaagcctcagctcacttcttaattagctgtaattccctgagcaggtgaccctgcctacttcagcctgtttccctgcccataaaatgcactaatgctggggaagccgcgctgggaggtgggtcctgaagctttatccaatcagtggcgctggcgcgggaaccgcccaatcaggcgcggagttggagaggagggcgtggcctccggcatttggcgggccctttgtctcgctcctgccagagttttagttgcctgtctctgctattctgcgtcctccacctcgggagccccaggtgactttgtcacagccggtgggtgtgcgggttgagcatcccgagatgggagagcggcctgtgaaaccggctggaccggcctccccacagtccgctcctgggtcgccgacctgagtccccgctggcacagctccgctccaggccactctggccgcaagatggcggctggactcgcagccaggaccacagcgtcccgccagtttctgcgcggcgccagtccggggctctctgggcagctctgcacccgcaatcccgagtatttcccgggttgttcagggaagacaggcgggtcatcggcagaatccccactcggtgtatgcgttggaggggctgctgcccgtggggtcttaagtcttttctgattattattatttttttgtgagacggagtctcgcttttgtctccaggctggagtgcagtggcatgatctcggctcactgcaacctccgcctcctgggctcaagcgattctcgagcctcagtctcccgaatatctgggattacaggcacccgccaccatgcccggctaattttttgtatttttagtaaagacagggtttcactatgttggccaggctggtcttgaactcctgacctcagatggtccgcccccctcggcctccgaaagtgctgggattacaggcgtgagccaccgcgcccggccacaaagaaatttttccgccgtccttttcggccacaaataaatttttccgccgtacttttcgtatttattaaattttctcattagagcctattattgattgtaatgcatttttctgtgaaattttgctgccattcattgaatgccaatgattcagaatgcctgctctgcaagagtacacacagctaaaaactgtagatatctaaagaattatttttaatatctatgttgtattcagcatattatgcgttaaaatctctcttggccgggcgcggtggctcacccctgtaatcccagcactttgggtggccaaggcgggtggatcacctgaggtcaggagaccagcctggccaacatggtgaaactccttctctactaaaagaaaaatacaaaaattagccaggcttggtggtgggtgcctgtaatcccagctactcgggaggctgaggcaggagaatcgctggaattcggtaggctgaggttgcagtgagccaagatcacgccactgcactccagtatgggttacaagagcgagactccgtctcaaaaaaataaataaataaaatctctcttatttttatttctacattagtgtttcttttcgagggggtatgtttttttagatcagttaattgtatttttgctttcaaagcttgatattatgaattgaatgataattttcaactctgtacaattttagacaatgtgatgcttaatttatatatgaattagccgtatgtcatctatagaaatatcgatgtgtttttcatctgtgttgccactacttcgtttatgacatactctttccatggttttcaatgattattctgtctaggtgagtagtcgggaaaataatcctaaattcacaatctacttatattttgaatctgtataattatgtgagaagaacactctttatttgaaggtaatgtttgaaaaatgtcgtaatgtctcttatgtagtctttaatttttttttttgagactgagtctctgtcgcccaggctggagtgcagtggcgcgatcttggcgggactccatctcaaaaaaaaaaaaaaagagcttctgcacagcaaaagaaactatcaacagagtaaacagataacatacagcatgggagaaaatttttgcaaactatgcatccgtcgaaggtctaatgtctagcatctataagaacttaaacaaatttacagtagaaaaacaacaaccccggctgtgcgtggtggctcatgcctgtaattccagcactttgggaggtcgagacgtttggatcacttgaggtcaggagttcaagaccagcctggccaacatggcgaaaccctgtctctactaaaagtacaaaaattagctggctgtggtggcatatgcctataatcccagctactggggaggctgaggcaggagaatcgcttgaacccaggaggcggagattgcagtgaaccaagagtgcaccactgcactccagcctgtgtcaaagagtaagactctatctcaaaaaaaaaaaaaaaagaaaaacaccaactccataaaaaagtggatgaaatagggccaggctcagtggctcatgcctgtaattccagcactttgggaggccaaggtgggtagatcacttgaggtcaggagttcaagatcagcctagccaacatggtaaaaccccatctctattaaaaatacaaaatatcgctgggcacagtggctcatgcctgtaatctcagcactttgggaggtcaaggtgggcggaccacctgaggttggcagttcgagaccagcctgaccaacatggagaaaccccatctctactaaaaatacaattagccgggcatggtggtgcatgtttgtaatcccagctactctggagactgaggcaggagaatcacttgaacccaggaggcagaggttgtggtgagccaagagtgcaccattgcactccagcctgggcagcaagagcgaaactccatctcatgatggtggacacctgtaatcccagctactagggaggctgaggcaagagaattccttgaacctgggaggcagaggttgcagtgagctgggatccagcctgggtaacagagcaagactgcctctccaaaaaaaaaaaaaaaaaagtgggggaaggacatgaacagacgtgtatcaacaatcatatgaaaataagcgcaacaccactgattgttaaataaatgcaaatcaaaaccacaatgagataccatctcatgcctgttagaaaggctatttttaataagttacagaaataacagatgctggcgaggttgtggagaaaaagaaatggttatatactgttggtgggagtgtaaattactttagccattgttgaagacagtgtgttgattttttttttttttctcctgagacagagttttgctcttgttgcccaatctggagtgcaatcacacgatctcagctcactacaacctccacctcccgggtttaagcgattctcctgcctcagccccctgagtagctgggattacaggaacgtgccaccacacccagctaatttttgtagttttagtagagacagggtttcgcctcattggccaggctggtctcaaattcctgaccttaggtgatctgcccgccttggcctcctaaagtgtggggattacaggtgtgaactgccatgcccagcctagtgtgatgaggaatcctattactgtatatacccacaggaatataaattattctattataaatacacatgcacatgtatgttcactgcagcaccatccaccacagcaaacacatggactcaacctaaatttccatcaatgatacactggacaaagaaaaatgtacatatataccatgaaatactatggagtcataagaaaaatgagatcatgccccttgcagagatctgcatggagctggaggccattatccttagcaaactaacacaggaacagaaaaccaaatactacttgttctcacttatgagtgacaagtaaataatgagaacacggacacgggggggaatgacacactggggtctttcaaaaagtggaaggtgggaagagaggatcaggagaaataatggtactaagcttaatacctgggttattaaataatctatacaaccccatgacacaagtttacctatgtaacaaacctgcacttgtaccctaacacttaaaagtttttaaaaagacctatttgtaccttttaaagaggaatcagccagtaatttcaaagatgattttgtttataaaacataatcttccacttgtccagtaaatgctcttcatttatttatttattggagacagacactgtctcccaggctggagtgcagtggtgcagtctcagctcactgcaacctttgcctcccaggttctagcgattctcctgcctcagcctcccgagtagctgggattacaggcctatgccaccacacctggctaattttttattgttattagagacgagatttcaccatgttggccaggctggtcttgaactcttgacctcaggtgatccacctccctcagcttcccaaagtgctgggattacaggcttgagccaccacgctcagccagaagctctttaacttaattagatcccatttgttaatttttccttttgttgcaattgctttggcatctttgccatgaagtctttgcctgcgcctgtgtcctgaatggtactgcctaggttgtctttcagagtttttatagtttgggttttacatttaagtctttaatccatcttgagttattttttgtgtatggtgtaaggaagggatccaggttcaatttcctgcatatgactagccagttctcccagcacaatttattgcaaattctttccccattgcttctttttgtcagctttgtcaaaggtcagatggttgcaggtgtgcagcttgatttctggccctctattctgttccattgatctatgtttctgttcttgtactagtaccatgctgttttggtgctgtagccctgtagtatagctggaagttgagtagcgtgatgcctccagctttgttatttttgcttaagattgccttggctattcaggcttttttggtttcatataaattttgaaataattactttaaattctatgagaatgtcagcggttgtttattgggaatagcattgaatatataaattgcttttggcagtatggacattttaatgatattgattctttctattcatgagcatggaatgtgttttgtttgtgtcatttctgatttctttgagcagcagtttgtagttctccttgagatctttcacctccctagttaggtgtattcctagatattttattctttttgtggcaactgtgaatgtgagtttgttcatgatttggctctcggcttgagtgttgtttgtgtataggaatgctggtaatttttgcacattgattttgcattctgagactttgccaaagttgtttatcagcttaaggagcttttgagctgagactatggggttttctatatataggatcatgtaatctgcaaacaagaatagtttgatttcctttcttcgtatttggatgccctttctttctttctcttgcctgattacccagaccagaacttccagtactatgttgaataggaatgatgagagacgacattcttgtctcattctggttttcaaggagaatgcttctagctttcgcccattcagtataatgttggctgtgggtatgtcatagatggctcttatcattttgaggtgtcttttttttctatacctagtttattgagagtttttaacatgaatagatgttgaactgtaatgaaagtcttttctgcatctattgaaataatcatgtggtttttgcccctagttctgtttctgtaatgaatcatatttattgatttggatatgttgaaccaaacttgcatcccagagatgaagcctacctgatcatggtggataagttttttgatttgctgctgaatttactttgctagtattttgttgaagatttttacatcaatgttcatcaaggatgttgacatgaagctttcttttttgttgtatctttttcaggttttcatgtcaagatggttggtcctggcctcatagaatgagtttagggagagtcccttctcctacattttttggaatagtttcagtaggaacagtaccagctcttctttgtacatctgggagaattcagctgtgagtccacctggtcctggacttttattgattggtaggctatttattactgcctcaatttcagaactcactattgttctgttcagggattcagtttcttcctggttcagtcttgatagggtgtatgcttccagaaatttttccatttcttctagattttctagttcatgtgcatcgacttgttcataatattctctgatggttctcttctctgaggtcagtggtaatatcccccttattgtttctgattatgtttatttgaatcttctctctcttcttattagtctagctagtggtctttttagttattttttccaaaaaaatacttcctggatttgttggtcttttgaatgtgttttcatgtcactgtcttgttcagtgcagctctgattttgattatttcttgttttcttctagctttgggatttgtttgcttttggttttctagttcttttatttatttattttattgtatttatttattttttgagatggagtctcgctctgttgcccaggctggagtgcagtggtgcaatctcggctcactgcaacctccgcctcctaggttaaagcgattctcctgcctcagtttcccaagtagctgggatggactacagggatgtgccaccacacctggctaattttttgtatttttagtagagatggggtttcaccatgttagccaggatggtctcgatctcctgaccttgtgatccgcccgcctcggcctcccaaagtgctaggtttacaggcgtgagccaccgtgcctggccttgttctctagatcttttagttgtgatgttatgttgttaacttgagatcttcctaactttttgatgtgaggctttagtgtcagaatgtagtgagatcagatgtattaagtaaggccaggcgtggtggccgattcctgcaatccctacacttctggaggccaacacgggagaatcacttgagcccaggagtttgagaccagactgggaaacatgtggaaaacttgtctgtaccgaaaatacaaaaattagccaggtgtgccagcacacacctgtgatttcagctacttgggaggctgaggtgggaggatcatctaagtctggggaggttgaggctgcagtaagccatgatggtgccactgcactccagcctgggtgacagagtgagaccctgtcaaaaacaaacaagcaagcaacagatattttatgcccttctctgggtaggaagcaaaatgaacagaactcagcattttaaaatttaaattttatttttgaattttaatctatttatttatgtattttgagatcaggttatgaaactggctaatttttgtattttgggttgagatgatgttttaccatgttgcccaggatggtctcgaactcctgggatgaagcgatgcacctgccttggcctcctaaagtactgggattacaggcgtgattcattgccaggttgcaattttttttttaatctcttgtctttctgagagtttcgtggcagagagtttggttcatttaagttcattctaaatagacatttaggacgttaacttctggcctcatggactctgaggttacaagtcccctggtctatcacaggaccatacacataagaaataaaaaaaaatcggctgggcgtggtggctcacgcctgtaatcccaacactttgggagactgaggcggctggatcacctgaggtcaggagtttgagaccagcctggccaacatggcgaaaccccgtgtctactaacaataaaaaattagccgggcgaggtggtgcgtgcctgtaataccagttcctcaggaggttgaggtactagaatcgcttgaacccgggaggcggagatggcagtgagccaagattgccccactgcactctagcctgggtgacaaagcaagactccgtctcaaaaaaaaaaaaaaaagactccaatcaaaaagcaaataagtaaataaacaaacataacgtttataataagtaattgtgttacaaagaaatatagttatgtcccctaaaccaaggtctcacagaaaaggaagcctgtgcacagactgggtcaactgtgtcttctctactgtccctacctcaaagttggcttcttccttgttgcctagaaaatcgtcgccctgactgggtatgattgttctttgatcagtatatgcatatatatgtattttttcattctttcctggctgattattgcgtgggtggttgtttggcgcctcctagcggccggctagcagtacaggcctcctccagaggccgcttgggctgacggcacggcttgtggcccacaggggcggccacctttctagagttctcttgtcctctggagctccagtggcagctgccgagggagggacagcccccgctgtgagctgagcagagctcgggagtcctgcagacttcagcagaacagtcccgatggtgccagagctctggcgcgtcccttgtgagtcatagctctggcgtgtagggctgtggaggggaggctgttaccgtgctcccggcatgagcttagtgtggggctgcccgggctggtccccagctcaccgcagctgcggaggcccgaccctcggaacccaccaggcatgatgcagggggccggggacaccccccaggcccggttgcgggcccatgtgtgtcctggccgtttgaggctctggccgatttcttttcccaagtccccatggagaatcagggaccgtcctgtgccatcttccgagagcctggaagggtccgcccgtgggctttccgagcgccgaaggggccacatgctgctctgagggtgccgcaggttcgtggggctcccttgcttggtgtccaccccctctggtttcctcctcttcccaccctgcgggtggctcgtcgccctggctgggacgccgctgtgggagcgtggtgggatggctgaggcgcgggcgtcagagggtgtggcccggcagcccccgtttcaggggtggctgtgtggtctggaagtggcggtccaggtcctgggcctctcccactcagcagcggggaggaggggtcggcggggagtaggggccggtcgcccccccttgagctcttccccgtcttagtggaccagcagacagtgtgggagagcgctgggaaggaaggttggcggagttatactccagacggacgggctcaggccccgcgcgccacactcggccacacttggcgcgtagtgtggacccggtgggcctctgccctcgccaccggctggcttctctgtccagccgctgggtcgaccagatgtcagccccaaggttagggtttggcctccagcttgagatgtttaagacggactagatagctctcgcccgcggcagtaccgcttaggtccagcagagggtgcgattacggctcacgcgccctccacctgcccggactcacccaggtcatcctcccttttcttttttcttttcttttctctcttctcttctcttctcttctcttctcttctcttctcttctcttctcttctcttctcttctcttctcttctctttctctttctgtctgtttttctttctttgagttttcgctcttgttgcccaggctggggtgcaatggggcaatctcggcttactgcaacctccacctcccgagttcaagcgattctcccgcctcagcctcctgagtagctgggattacaggcgtgcgccaccacacccagctaattttgtatttgtagtagagatggggtctccatgttggtcaggctggtctggaactcccgacctcaggtgattcgtccaccttggcctcccaaagcactgggattacaggtgtgagccaccatgcccggccccatcctcctgtttctgcctccagagtagctgaggctcgggatctttctgggtttttttttctttttttctagccccactttgagtttgtttccacggtacattgagttactattgttttgttttgttttgttttctctcttaagcaccttcctgcacactgaagttgctgttttaaatttcttctttcatacgtgtgtgtgtgtgtgtgtgtgtgtgtatgtttttttaaatgaggtcttcttagtcacccaggctgaagtgcaggtgtgtgatcacagctcactgcagcctggacctccttgggctcaggggatcctccgtcttagttctcccagtagctggtactacagtcacgtaccaccacactggctctttattttgcattttttactttttatttttgtagaaatgaggttctgccatgtttctcagactggtctcgaactcctgtgatcaagcaatccaccagccttgacctcccaaagtgctgggattacaggcatgcaccatcctgcctggctggctggctatctatctatctatctgtctatcatctctctctgtctgtccagctctgtctatctggctggctctgtctctgtctttctgatctatctatctatcatcttttttttttttttttttttttttttgagacaatctcacactgtcacccaggctggagtgcagtggcatgatctcagctcactgcaacctccacctcctgggttcaagtgattctcctgcctcagcctcccgagtagctgggactacaggtgtgcgccaccacgcccagctaatttttgtgtttttagtagagatggggttttacaatgttggccaggatgatctcgatctcttgaccttgtgatccgcccacctcagcctcccaaagttctgggattacaggcgtgagccactggcacccagcctgtatcatctttttagtagagatgtgatcttgctatgttgtccatgctctggatatatatttcttttttaactttaattattattttttaatagagatgctgtctcaccatgttggccccggatagtcttggactcctgggttccaggtatcctccgtggcctccaaaagtgctgggattacaggtgtgagccactgtgcacggtctggtcatgtttttgatgtgttgattctttccagtccagatgcataatctcatgtctgaacattcctgctggtgtcattatgacatatgactttacccagcaccagagtgatttggtgcccctgccctggcctagcccatggaagggattgtgacatatccctggacccagtaccgaggtggtgtgactattctactgccttggcactacccacaggggacattttgacatcactacatcttgtacccaggtggtgtgaatcttctctccagccttggctcttccacaggggacattgtgtcatatggctgggccccacacataggttatatgactctcctgcctgtgccctgcccatgtgggccactgtgacttttgctgagtccaacacccaggtgatgtaactctactgcctaggtcctgcctacagaagatcttgtgacatatccctgcacccatcacacaggtaatatggctctcttctcctgcctggctcctgcttacagaagggattgtgatgtattactgggctcagcacctagctcacatgactctctgcctctttctttctaggttctgcccaaagaggatattgtgacatgtcactgggcctaatactatgctgacatactcttttttttttttttttttttttttattgatcattcttgggtgtttctcgcagagggggatttggcagggtcataggacaatagtggagggaaggtcagcagataaacaagtgaacaaaggtctctggttttcctaggcagaggaccctgtggccttccgcagtgtttgtgtccctgggtacttgagattagggagtggtgatgactcttaacgagcatgctgccttcaagcatctgtttaacaaagcacatcttgcaccgcccttaatccatttaaccctgagtggacacagcacatgtttcagagagcacagagttgggggtaaggtcatagatcaacaggatcccaaggcagaagaatttttcttagtacagagcaaaatgaaaagtctcccatgtctaattctttctacacagacacagcaaccatctgatttctcaatcttttccccacctttcccccttttctattccacaaaaccgccattgtcgtcatggcccattctcaatgagctgttgggtacacctcccagacggggtggtggccgggcagaggggctcctcacttcccagtaggggcggccgggcagaggcgcccctcacctcccggacggggcggctggcctggcgggggctgacccccacctccctcccggacagtgtggctgctgggcggagacgctcctcacctcccagacggggtggctgccgggcggaggggctcctcacttctcagacggggaggctgccgggcggaggggctcctcacttctcagacggggcggttgccaggcagagggtctcctcacttctcagacagggcggccgggcagagacgctcctcacctcccagacggggtcgcggccgggcagaggcgctcctcacatcctagacgggatgacggctgggcagagacgctcctcactttccagactgggcagccaggcagaggggctcctcacatcccagacgatgggcggccaggcagagatgcgcctctcttcccagacggtgtggcggccaggcagaggctgcaatctctgcactttgggaggccaaggcaggcggctgggaggtggaggttgcagcgagccgagatcacgccactgcactccagcctgggcaccattgagcactgagtgaacgagactctgtctgcaatcccggcacctcgggaggccgagggtggcggatcactggcggttaggagctggagaccagcccggccaacacagcgaaaccccgtctccaccaaaaaaacacgaaaactagtcaggcgtggcggcacgcgcctggaatcgcaggcactcggcaggctgaggcaggagaatcaggcagggaggttgcagtgagccgagatggcagcagtctatgctgacatactcttatgccttgacactgcccctagaaggcatggtgattgattgctgggcccagaaccaatgtgatgtgagtctcctgcctggaccctgcctacaaggtgcattgtgacatatctctgggacctttaactattttatgtgactctcctctcttacctggatgttgcccaaaaagagattgtgacataaatttgggcccaacacataggtgatgtgactctcctctcctgcctcttccttgcccactgaagagtgaatgacttattgctgaattcagcacacaagtgatgggattcttctgcctgctcacagaagtcattgtgacatatatctgggcctatcactgaggttatgtgactcttttcttcctggaacctgtccacagtggggagtgtcacatgttgcttggctcagaacctacatgatgtgattctcttcttatgcctgggccctgcccactggagtgattttgacatgtagctgggcccagccccaaggttatgtgactccacacatcttcctgagccctacccacagggggcattgtgtcatatctctgagaccttcaatgaggtgatgcgactcttttgtttgggccctcttctcaggatattgtgacattgctgagcccagcatctaggtgatgtgactcttctctactgtttggtctctacccaaaaagggattgtgacatatcactctgtcaagaacctagaagaggtgactctcctctccagcctgggacctccatacagtgtgtattgagacatatcactgggtccaacacctagataacgcaactctcctgcatggggcctgcccataggggtattatgagccatctttctattaatcacctaggtgatgtgacactcctcttttgcctgggccctgccaaaaaagtattgttacatatcactgagcccagcagctaggtgatatgactcttctctcatgcatgggccctgcaaactggggtgtttgttacatatagctgggcccagcccctaggtcatgcgattcttttttttcctgagccctacccacagtgaaaactttgacatatttttgggcccatcatttatgtgatgtgactcttgcatgggccctccccacaaggggtagggtgacatattgctgaacccagtacgtaggtgatgtgactctcctttatggattgggctttgcccaagcagggattgtgatgtatttctgggcccaccacctagctgttgtgattcttctcttctgcctaagccctgcatacattgtgtattgtgacatatacctggattcagcacccaggtgatgcaactttatgtcatgagaactgcctacagaagtattatgacatatctctttttctttttcttttttttgagacagaattcgctcttgttgcccaggctggagtgcaatggtgtgatcttggctcacggcaaactccacctcccgggttcaagtgattctcctgcctcagcctcccgagtagctgggattacaggcatgtgccaccatgcccagctaattttttatttttttttagtagagacggggtttctccatgctggtcaggctggtctcaaactcccagcctcaggtgattcgcccactgtggcctccaaaagtgctgggattatgggcatgagccactgtgcctggccgacatacctctttttcatcacctagatgatgtgaccattttattttccatgtccctggcatattttgggtatagtgacatatcattgagttcaacacccattggatggggttatctgggagatttaattcccctcttctgtctgcaccctgaccactagggattgtgacgaatcactggtctcagcaatcaggggatttgttttttttgcctggtcctcgcccacagagaacattgtaacatatctctggtctcagcactcaggtgatgtgactcttctgactgtattctgctttcaggaggggattgtagcatattcctaatggagcaccaaggtgatgtgacactgctgcctggtccctgccctcagagaagattgtgacatatcactgccccgaaacccaggtgatgtgagtctactggtcggtccctattcactggtgggattatgatgcatatcttggcccagcttacaggtgcaatgattgctttcataccttgaaacaaccaatagcagatacactgtctctcatagccagagttaggaaaatgggtaatatcttgggtctcctcttcgtgtgaaagtcatggagaatctctcacatactgtgtaaagttgtcaaaaggtacagcggatgtcctaacagaactcagcacacaggtgaggttgtgacactcatatgtatgacctgccaacagtaaatatttcatccttccatataaacatagctcacaattcagattctgaatatcacacccagaggcagtcaaatgttggaaaatggaatctcatatgtgaattcgctccatgcgggggttggcatctttcagaccaagattcggcacacctgtgagtctgtgactccactaaggggacacagtttgcaggagggattgaggttcttatacatggatccagaccatcattgagattgtgactcatttacttagactcaacatacaggaagtgttagatctcatacctagaacaagaaaatgtgtggaattgttaatcttatgcttcgaccttcatgcaggtgtgattgttacatacacctctgcccagcacctgagtgatttgactcttctgcttgggcccagcgtacagatgggattgtgccgcattgctggacccagcacttaggtgatgtgagtctattctcttgccttattgcttttcacggagggcattgagacatcactgggcctagtgcccaggtgacgtgactttcctctacttcctgggcttttcccaagaagggattgtaatatattgctgggaccagaacctaggtgatgtgactctcctctcctgcctggttcctcttgcacatattgtgacatgtggctggtcctgataccttggtgatgtgactctcctgcatgggacttgcccacagaggtattacaacatatattttcattcatcatctaggtgatataattctcctcttctgcctggccctgccaaaaagtgggagattatggcaaatcactgaacccagcacctaggtgatgtgactctcttgtttggcctgggcctctcatgttttgggtattgtaaaatatcactaggcccaccacctatgggattgcatgctcctaccttggctttgcccacagggaccttgtgacatatatctgcacccatgacctagaagatgtgacatttattttttgcctgcaccctgccctgcacaggaatgattgtgacatatccttggaaccagacaccaggtgatgtggctcttctgcctctgtcttgcccacagggagcattgtaacatagcgctgagctcagcacccaggtgatgtgactctgttgcctgtgctgtgctttcaggacagaattgtaacatatccctggctgagcactcaggtgatgtgacactcctgcttggcttcttccctcagcagattatgagatatccatggctgaaatccaggtgatgtgactcccctgctagctcccttcttataagtagaattgcgacataggctgtggtcagcttacaagtgtgatgatgactctcatgtcagcttacaaatgtcatgatgactctcatgcctcaagtcagctattagaagaaatactggccaggcacggtgggtggatcacctgaggtcaggagttcgagaccagcctgaccaacatggagaaaccccttctctactaaaaatacaaaaaaaattagccgggcgtggtggcgcatgcctgtaatcccagctacttgggaggctgaggcaggagaatcgttccattgcactccagcctgggcaacaagagcgaaactctatctaaaaaaaaaaaagaagaagaaatacctttcatagctcagaaaaatgagcgacatcctgggtctctctttgtatgaaggttataaaagattgccacacccccacacgtagtataatgccctcaagtgttagagtgtgtcatcacagggcacagcaaacctcaccaaccattagtattatcaccctcacacatggaaagagcccgctgctgaggtcttgaatctcacatgcaaacagtccacagttggaattgtgactgtcatatgtgagcatccagccacagttgggatggtgacacatttctaaactcaaaatcataggcagatgaggtctctactatttggatccagccaattggagaaatgttgactctcacacctgggcttagggccacaggtatggtcatgggggcatataaacatgaaggggtcagagtgaattgtgacccacattcatactacataaagccccttgggtagtatagagagtgtattaacaaggcccagcacacaggggagatgttgacagttgtatgtacacccacccaacagtatacatcatcatttccccacatgaacacagcccacttctggggttctgaatctcacacctataggcagtcaaaggctggaaacttgactctcatgtggattcagtccacaggtgggttggtgacattcagagcaagattcagcacacctatgtggctgtgactttactatttatacgtggcgtgcagaaggagttgaggctgttgtgcacaagttcaatccaccgttgagattgtaactcctgttcttagacacaacatataggaggttaacaccgggacatgtgtgggattgttaatgtcatccctggaccttcctgcagttttaactgtgacatttttcttttcttttttttttttttgagatggagtttcactcttatcacccaggctggagtgcaatggcacaatcttggctcactgcaacctccgccttccgggttcaagtgattctcctgcctcagcctccgagtagctgggattacaggcatgtgccaccacgcagggctaattttgtatttttagtagagacagggcttctccatgttggtcaggctggtctcaaactcctgacctcaggtgatccacccgcctcggcctcccaaagtgctgggattacaggcgtgagccaccgtgcccggcccaattgtgacatttttctatgccaggcacctgagtgatctgactgtcttgtctgggaccagcccacaggtgggatagttctgctgaacccagaactgaggggatgtgactcttcttctgtcttggtgctgctcgtagaggacattgtgacatctcactgaaccttgcacttagttgatgtgagtctcctctcctgccttggcactgcctactggggcattgtgacatatctctgggcctacatccaggttatatgactctcatgcctgtgccctcaccacattgtgacatattgctgggtccaacaccctggtaatgtaactctactgccaacaaggaacattgtggtatttttttcacccattacccaggtgatgtgactctcttcttttgcgttgttctgctcacagggggaattgtgacatatcacttggcccagtaccaagcaagtgtgactgttctattcatcataagtcctgctttcaagggagattgggacatattgtggggctcaacaccaatgtgacattactgttttgccttggcccagaccttaaaggcactgtgacgtattgctcggctcagcaacaaggtgacgagagatcctgtgtggacattgacaacagagagcattgtgacatatctttgggagcatcagctatttgatgtgactctccttttataccaaggctttgctcataggggagaccgtgatgtatcttctggcccagaaatcaggcgatgtgtttctcctgcctgagctttgctcacagggagcattgtgacatatcactgagcccagcacccaggtgatgggactctactgcctgtcccctgctttcaggaggaaattgtaacatatctctgaccaagcacccaggtgataagtcttctgcctggtgcctgttctcagggaagattgtgacatatccctggcccagcaaccagatgatgcagatgacgtatctctcctgctcactctctatccacaggtaagattatgacatataatcacgcccagctaatttttgccttttaatagagaaggggtttcgccatgttggccaggctagtctcgaattcctgacctcaggtgatctgcccaccttggcctcccaaagtgctcagattacaggcgtgagccatggtcgctggcctagggagtgtgactttctttttgctgcctgttctctactcaacggggtaattgtgacatattgctggtcccagctcctagctgatgtgactgttttctttttcctaggttctgcccacaaaggagattgtggcatactgctgggcctaacactaaggtgatgttacttctctgctttggctatgtccttagaaggcattgagacacactgctgggcccagcaccaagatgatgtgagtcctctgcctgaaccctgaccacagggagcattgtgacatatttcttgacccactgcaatctctcctatggacaaagcccaggtaaatgccctattttacctatgtgatgtgacactcctcttctgcctgggccaagcacaccagtgatgtaattattctgcctgttccctgcacacaggagtcactgtgctatatatttgggcccatcacctagatgatatgactctcctcttccagggtttgtcctcagtgagaattgtgatatatcgcttgacgtagcttctatgtgatgtggctcttctctcatgcctggtcccttccctctggggtgattggaacataaagctgatccccacagctacgtaatgtgactttcctgtttataagccctacccacagggggcattgtgacatatctaggcctctcacctaggtaatatgacatttatgcctagggggtattgtgaaatattactggaccaagaacttaggggcccacaggaggcctttgttacatatctgtgcatccattactttggaggtgtgactctcttccatctgcaccatgcccatacagaaaattgtgacacatctctgggttcagcaaccaggtggtatatcttttgtgcccaggccttgcctgcagagagacatagctgggcccactacccaagtgatgtgactttgatgactgtgccttgctttcaggagggaattttagggcaacagaaccctggccaggcaaccaggcgatatgcctggtttcttccctggaaaaattgtgatatattcctgacccagcacccaggcgatgttattctctcatttgctttctactcacaggttggattgtgacatatactttagcccagctcacagttgtgataatgacactcatactgacaaatcagtcagtaggagagatactggcacttgtagctaaacttagagaaacaggtaaattattggggtcttctctaggtaagaacattataaagcataaccattctttcacagtttgtataaagtctttggatggtacagagtgtcatcacagggtcaagcacacaggtgagactgtgtttctcatatgaacaacctaccaaatgttggcaaacctaccaacaccctcacacatggacagagctcactggaaagatcctgaatttcacacgtggatgcagtccacagtaaaaattgtgactgtcatatgtgatcatgtgaccacagtcaagatgttgactcatttcaaaacaaagctcataggcagatgaggactcttctctctggtcctagccaattagagagatgttgactctaacacatgggcttaggtccatagctacgattatcagttcatactagaacagaattctcagagcaaattgtgactatcatgcatattgtataaagccctcagatggtaacagagagttttgtaacagggcccagcacacaggtgacattgtgatactcatacacacactcagccaacagtaaagattgtcatcttttcatatgaacacagttcattgttgaagttctgaatctcacacctagagatagccaaaagttggaaaattgactttcacacatggattcagtccacatgtgggctggtgactctcagaccaagattcagcgtatctgtgaggctgtgagtccactaaggggacacagtccactgcaaagattgaggctgtcatgcaggtatccagtccaccattgagattgtgacttgtgtattcagactcaacatacaaaaggtgttgactctaatacctagaaatgggacatgtgtggaattgttaatttttttttttttttttttgagacggagtttcaatcttgttgcccaggctggagtgtaatggtgcgatctcggttcactgcaacctctgcctcctgggttcaagcgattctcctacctcagcctcctgagtagctgggattacaggtgcccaccacaatgcctggctaattttttgtatttttagtagagatggggtttcaccatgttggccaggctggtcttgaactcctgacctcatgtgatccacctgcctgtctcccaaagtgctgggattacaggtgtgagccaccacacccagcaggattgttaattttatccctaccttttccttcaactgtgactgtaacatacacctctgcccagcacctgagtgatttgacttttctgcttggtgcctagtccacagatcagattgtgatacattgctggacctaacactaggtggtgcgactctgtacttttgccttggcactgcccacatgggacattgtgacatatcactgggcccctcaccctggttatgtgactctcctacctgtgccctgccttcatgggtcattgtgacatattgccatttgcaacatccaggttatgtaactctccttgctgggtcctgcctacaggaagctttatgatctatctgtgtattcatcatccaggtaacgtgactctttctcccaggtccctgttcaaagaaaggattgttacttatcaatgggcccagtgccttagctgatatgactcttctacctatattctgcttacagtgtacattgtgacatactgctgggctgaacaccaaggtgatgttacatttttgccttggcgtttcttttcatcaagcattgtgacatattgttgggctcagaaccaaggtgatgtgatccttctgcctgaaccttgctcaagagtcaacaccttttgcccaacaagaatagtgacatatttgtgaatccatcgtctatgtgatgtgactctcttacttggatttttcctataggagagattgtgacatatcacagggcccagcatctagataatgtgacgcttctttccttccatggccatgctcccataaaagagagtgacttatccctgggatcagcccacaggctatgtaattgttctgcctagtccctgtctacaggggttattgtgacatatctcttggtcccgttcttcttctccctgggacttgtccacagtgggaattgtgacatatcacttggcccagcacctatgtgatgtgactcttttctcatgctttggccctgcccactggttggttgtgatatgtagttgggcccagctcttaagtcaggtgatctttctcttcctcctgagccctactctcccaagaccagctaggtcatggagaccctaacccagcggagctagaggaattaaagacacacacacatagaaatatagcatgtggagtgggaagtcaggggtctcacagccttcagaactgagagcctcaaacagagatttacccacatatttattgacagcaagccagtgataagcattgtttctatagattacagattaaaagtatttcttgtgggaaataaagggatgggctctggctagttatctgcagcaggaacatgtccttaaggcacagatctcacaagctattgtttgtggtttaagaacgcgttaagcagttttctgccctgggtgggccagatgttccttgccctcattccagtaaaccaacaacctttcagcatgggtgtcatagccatcattaacaagtcacagtgccgcagagattttgtttatggccagttttggggcctgtttatggccagatttgggggcctgttcccaacactactcacaggggacattgtgacatatctctggggctctcatctagatgatgtgacttttctgccagggctcttttctcagaggatactgtgacatttcttgacctagaacctaggtgatgtgactctcttctgcttgggctctgcctgagatgtgacttttttttttcccctgggctttgcatacattgtgtattctgatatatgactgggtctaagacccaggtaatatgactctaactcatgggttctgttcagaagggtattatgacatatcatttgttcctcacttaggtgttatgactctcgtcttttcactggaacctgccaaaaagggtgattgtgacatatcactggacccagcaccttggtgatgtgactctcctctcctccttaggccctgcttacattgtgtctgttgaaatacggctggtccaacacctaggtaatgtgactctcctgcataggccttgctaataggggatgtatgacatatgttttgtttatcacttaagtgatgttactctccttttcttcctgaatcctgtaaaaggtgggggattgtgaccctatcactggacccagcacataagtaatatgagtttcctgcataggctctgttcagaagggtattatgacatatctttttgttcatcactttgtgacttgtcttttgactggaacctgccaaaaagggtgattgtgacatattgctggacccagcacctaggtgatgtggctctcctttttttctgggcctcacatattttgggtattgtgatgtatagctgggctcaacacctagcagttggggagctcctttcttgaccattcccacaaatgacatatctctgctatgaccgcctatgacacatgacctaaatatgtgacccttcttttctgcctgtaccctgctaacagagaagattgtgacaaattgctaagtgcattgtatcttgtgctaaccttctatctcagcctgtgaccaagaatgcctaactgccggggaatgcagccctgtaggtctcaacctcaatttgcccagccactattcaaaatagagtcactctggtttaaatgcctctgacattaagatacactgtaaaattatgaaaaaagttgatttgaattttagcaaatgagaaatgaaataattagaatgggctattctgaaagatatagcattagttatatttgtgtttgagttttctattaacctatatttgttacttatgaatagataccttgttttattctgtctaaacagatacactaggtggggtgcggtggccatgcctgtaatcccagcactttgggaggccgaggggagtggatcacctgaggtcaggaatttgggacaagcctgaccaacatggcaaaaccctgtctctactaaaaatacaaaaatcagctgaccatggtggcgggtgcctgtaatcccagctacttcagaggctgaggcaggagaattgcttgaacccgagaggtggaggttgcagtgagccaagatcatgccactgcattccaccctgggtgacagagcgagactctgtctcaaaaaataagaaaaaataagcggccgggcatgctggctcacgcctgtaatcccaacactttgggaggccgaggagggtggatcgcaaggtcaggagttcaagaccagcctggccaagatggtgaaaccctgtctctactaaaaatacaaaaattagccacgtgtgttggcaggtgcctgtaatcccagctactcgggaggctgaggcagagaattgcttgaacccaggaggcagagtttgcagtgagccgagatctcaccattgcactccagcctgggtgacagagggagattctgtctcaaaaaaaaaaaaaggacataaatttaatgttaagtgtggactcataaagaatctagacagccaccaagccatttgtttattcttgatttcttaaagcttccattattaaaagctctgcattccattactcatcacagaaaataatctaaattaaatatgaattaagtttgtgtgtgtgtgtgtgtgtgtgtgtgtgtgtgtgtgtgtgtgtggtgattattctaaattactaaacagattaaggccaatttttttatgtcaaacatataattctgagaaacaatcaatactttatgtacatttctgttacctaataggctatttaagcatttatacagaaattttatacagttgtcatttttaatgcatgttttctgatagtataaaagctttctcatgcaagaaggctgatgttataatagtagctaaaagaatattagaaaatatgtttttttttcatgggacatttctgaaaggtctctaatgatcaagatacttatttcactagacaagttgtaaaactgttaaataaggtattgttcctggaccaaactgagagttgggctgctatttctcatggcccaataacgagatgcagatgaactggggaggaagagagttttatttctgcaaccagttacagggagaaggcctggaaattatcaccagaccaactcaaaattacaacgttttccagagcctatataccttctaagctatatgtctacatgtaagtgtgcattcatctaaagagataagtgattaacttcttttatttaatctgtaactaaggtctgagtcttgaagaccttcccctgcagcctcagtaaatttacttaatctaaatgggtccaggtgctggggtaattacccttatcttgtctcctgctaaatcacagtggtttggtgaattccttcagacctccaataaacctgtttgtagaggcctggggaatttcttcagacccccaataaaacttgtttaatcctataaggcccaagaaaggcctaggcgaaactcttgatgggcttttgttacatcccagcctttgtataaggtcactggctttttttttttttttaattgagacggggtctcactctgtcaccaggctggagtgcagctgtacaatctcagctcactgcaaactccgcctccagggttcaagccatccttctgcctcagcctcccaaatagttgggactacaggcacatgccaccacgcccagctaatttttttgtatttttagtagagacggggtttcaccatgttggccaggatggtatcgatctcttgaccttgtgatccgcctgcctcggcctcccaaggtgctgggattataggtgtgagccactgcgcccggctggtcactggcttttaatatttaacttaaccactcagtcagtactgaaacagttgttagtgaggtctggcctgccacagtattacaggtacaatagtattgagcaaagctaactaaattgactggattgcttttgtaattgcagattgatgacaatcagattcacttagagtggaaaaagtatgttggcccttataaaatagtcattagaaggcctatgtgcgtaatagaacctcatgtgtcttctgctactaaagtctaacattactaaattcaacaaggctttaatgcattatggcaaagcacattttcaccaggtgaggaaagcctttactagtctactgactgaggagagtaaaaccctttataatcaagaacccagagattgaatctgcctgccacctacactgacgcaagacttcaagaccttgaacattggattgataatctcacaacttagaagggcccctccaaactcttgaaattgtaaacccataggagattttaaggtaaagctaaccaggaaagtttgtcctcaaaagcagatggccgtctccatgtagatagcttttttcacaagatcaaaaatcaagacatctcgttatcatgacactcttagttcacagtttgtttatggttctacaaaccacagaaattttaaaaagtggtctcttgtgtgcactcatgggggtatacttatatgtagagaattttgcagccaacattatgtatgaggaaacttattccttgaaaggtaaaagaagaagggccaatgtaggtgagaagttttaatgaaacatttgttttctcacaatatcaaaaacagaatattggtccactgctcttaacctatttcataagttaaaaagaacttattcagaataggttaaagagcattgccaggaggccattactcttctgaatgggtatcactgtttagagtaaatgaggcaatggttacaaatttatccctctcaatagggctctatagcagattataccataaaaactatgcttacacaatagactttaagttttctcacaaagttatgctaaatataatttcttttgattacttactggataaatagatatctgtgcagttgctaatagttgcccatggagaactacagccggtattacagagatgcagttgtagatgattcatgaacaggctgattagatgaaatgagtagatcatttatctagctaactatttgatctatttaactttaattggttgttcatggggaccctggctaaaaagcatgcttcaaactcttggtattatcctcctgatagtcaaaatggtaatcttcctactgcactgtattctctcaaaagatgtaaacgtttgaatgtagtcatctgtagaatgtcaaatggtctctctttaactggaatgacagaaactcaaagacatatgtgactatgaagacagcacaacctatgaatgacatgctaaggacaaaaaacaaaaataatggaaactgagagtggcactaaagccccgagttttggttacactgtgacctatgtaagaacttaaccaaacggggaattttttaaagaaaactattggaggccataattctggactgagcttatgcactaggtccaaacaaaccaaaccaaaatgagtcactcatgctggatgtgacataattaaactaaaaatttaaggcaacaggtagattctaaaactggccaggttttgtttttcttctctaaatagcagatttcaacacaaggaggtcccctgtactctaacactttaaaaaacaaataaaaataatttcaaaataataagctgaagtttttatttccactttacaaacccacagttctgctgtttcacagtgagattcgagtctaaataagtacatttttgatggtgacaaagtgatattaatgtctaaagttttggtctcaaacttgagaagatgacaaaagggagaaattgttaaattagttgtagcctaaagcttccctcttatgtttaattttggctaataggatttgttttttgttttttgtttttttacatagtaaacttaatgttcaaatgggacatatcttaagctgtaataaatctggctgtttctgtacctcacttccattttctgtatgtcattttgcttttctggttcataaaaattttaccaacatgtggctgtgttggagtctctctgagcctactctggatccataggttacccgatttgcaaatcatgatttgctcatttaaactgttaaatttaatttttctaaagttttcttcttttacaaattttcaaattttttatgatgaaaataaataatgttattgagctttgattttctaaaatcatcccacagctattttcccaaataataataatataataataaataataatacaataatttcccaaataataataaaaatagtgaaaaggcagctgatgatacatgtctgaaggacctcagttgagcccagcctaaatggctgaccatctcaattacgagcaaataagttttggatggtttgttatgctgcaatagctaactaatacatgcaccctgtgcagatggaatgccaggatttaatgacaggttgattactagttaccttctgacagtggacaccctaaagatactgacttttcttttctttttttcccgatttgaagttggatgtctcctaagacaatgttgagtaatgcagaaatacaggtagacatgtatgtgtgtgattggtgcttatactcacacagtaccccacaccacaggaaaaaaacagataaccacagcctgaccattagagccaaggccaaacagcaaaataagtttgcctttaatttattttcttcatatctttttttttttttttttttttttttttccgagacggagtctcgctctgtcccccaggctggagtgcagtggcgcgatctcggctcgctgcaagctctgcctcccgggttcaagccattctcctgcctcagcctccagagtagctgggactacaggcgctcgccaccacgcccggctaattttttctattttttaagtagagacagggtttcaccgtgttagccaggatggtctcgatcttccgacctcgtgatccgcccacctcggcctcccaaagtgctgggattacaggcgtgagccaccgcgcccggccttcttcatatcttaaagttagaggttaagactgtggacagacccaaagacatagagttttcttctcctgtctcctgtggccccagaattttttgttcactgtctgatctctggatgaaaggtggacaacaggtggcaaagagtggtctacctgtggttattttatttgtgctgccctctgcccttgctatggccactatctatcgcaccctcagaaccgaagatagatgttagtagagagaggctgtctcctcacctctggcagaaaagggatgttcagggcctccacccacctgacatcagagctgcacttcaacgtggtggctgttggccatgtgtggctcctgggtgcctggaatgtgcctggtctgaactgcaatttgctagaaaagtaaaatacagagttggtttcgaagatttagttccaaaaatatatatagtgccttaataattacatattgctgtgaccccagaaaatctgagacatcagttaatttagaaagtttattttgccaaggttgagaacacgcctatgacatagtttcaggaagtcttgaggacacctgcccaaggtggtcagggaacatattggttttatacattttagggagacatgagacatcaatcaatatatgtaagaagtacattggttcagtctgaaaaggtgggacaacttgaagcaaaggcaggaagacacgaagctggagggagcttccaggtcacagataggtggactcaaattcttttgagtttctgattggcctttagttcccagcttgagttttccttagtaattttgggggcccaagatattttcctttcacattgctcacatattaaaattataatactttaaacatattgggttagttacattattacaatcaattccacgtgtttcatgtttctttttaaagtttggctactggaaaattaaaaattcacatgtggctcacattttatttcagaggactgcctcctttttaaaatctcaggctgcctgctcaaaggaccagaagctaggaaggtgataaaagctaaaatttaaaagtaattgttattatattcttttcatttgtgactagccatatagtatatttataaatgcatatgaccttacacacaaggttcaatgcaaacaccctctagggtgggcctggctcagctcggaggaaagcctgcctgaaaaggctgcagctaggctgtcacgcttcattctgcccagcaactgatcaccctctgtcactcagggcctgagagggcgggtcttaaacattatccaatcaggcacgcagctggagcgacaggacggtttccggaatatggcggggcgtttggctcttgctgcagccagagctccaggtctcgtcttcatttctgtgtcctttgttcttagaggcccagcctgtgtggccctgtgacccgcagatattgggagatacacagctaagactccaggaccccctggaagcctagaaatggtgagagtgccgagtctgacatccccagagagggggaggggctggtcggaaccgtgagaagtggccgtggcggacttaggtctcccggcagtcagctccacaatctgcgcccggaattctccttgcccagctcggcttcagtccccttcagccataagatggcgactgtgctgacagccgggccccgggcgtcctgtcttccctccgcagtgactgtgcctgacgtgtagccctgtctggggagctctgcacgcgcaattccgcagtctctcccagattgtgcaagaaccatgggaggggcgtcaggtgagaatagtgactcgggatgcgggttcatgagcgggaagagctttggtccgtggggttcccagttcccattctctcctattaaaaatctatgggagtggccgggcgcggtggcttatgcctgtaatcccagcagtttgctgggaggcgggcagatcactgaggtccggcattcgagaacagcctggccaacatggtgaaaccccctctctgctaaaaatacaaaaattagccggatgtggtggcaggcatctgtaatcccagctatgtgggaggctgaggcacgagaatcgcttaaacccaggagaccaagattgtgccattgcactccaggctggttgacacaatgagactatctcaaacaaaaaaaaaaaaaaaaaaggggagtcactgcaaaatattaaagaatttaattaaagagtggttctaaaattgtaaagcacccagctgtgggatgtagtttgtggtcctttggaggagcttgaaggaaagactttgcgcatggtacaaaaacgcaaattcagttattggttaggtagggttacgtagtttcttaatttccatcttcagcttacaaaatttcctggttatgtaatcagagcttaattccagttaatagttaaccctgtatttgttttccccagtgtagtaatttacaaaaaaaaaagcatttgagttagttttttgtttttttttttttttttttgagatggagtttccctcttcttgcccaatctggactgcagtggcgcgatctcggctcactgcaccttccgcctccgtgttcaagtaattctcctgcctcagcctcctgagtagctgggattataggcaggcaccaccacgcccggctaattttgtatttttagtagagacggggtttctccgtgttggtcaggcttgtcttgaactcccgacctcgggtgatccgcccatctcggcctcccaaagtgctgggattacaggcgtgagccacggctcccggcttgagttagatcttttaaaagtaggaattcagggactacagccacctcagtcgaattgcctaccacttaactattttcactccctacacaaaactgatcttcccctgcatttttcacaggtgtcctaagcagggtctcaaatctactcccacgccccccattcctccagcctaactctggcttgcagtaaaatacaaaatttccatttcctcctgacaatcccaaatgccaactcccactactccctaattcacactattaactatttgtcctttagtgtacatttttgatactgtattttaattaaacattttttgacaaagcattggatggcacatttaaaaagatttgttttctgtttataaatattttccataagaagaaagcaaggaataatcttctgacactgtattgtaaaaaaatctttgtctcttttccttttatcttccctaggcatagagattttatgagaatgttttggcatcaaggtttttcttggaatttttgtggggtgatgtgtcctcagccaccctttagtttttttcctggtcctgggttccagtactgtctgtgaataaaccaagatatcagtcatggctatgtctgcaagactgtctaatgaatattaattcctgggtcattttctcccataggacaacctgtggtatggagtgtagcctctgaagggagcaggtgtattccctggggctgagaggaatctcctggtgtacttttcgtttgaaaagctaaccccttcagatgttaagactgtgttcacccagcccgactttcctttctttgggccacattgctggtcacccaatcaaatgctggtattgagttgaaaacaaataatttctgaccccttgattctctacaatttgtgaaaaaagactagtatctctgccaggcacggtggctcacgcctgtaatcccagcactttgggaggccaaggtgggcagatcacctgaggtcaggagttcgagaccagcctagctaacatgatgaaattccgtctctactaaaaacagaaaattaaccaggcgtggtggtgcatgcctgtaatcccagctactcaggaggctgaggcagaagaactcgggaggcggaggttgcggtgagccgagatcgtgccattgcactccagcctgtgcaacacgagtgaaactccatctgaaaaaaaaaaaaaaggtgatatctcaaaagacaaaagaaaccctgaccccggtgagatgaggcgagaaattgcaaagtaaaatgcacttgggacacttactggaacatagagcagtctcctgagagggtggttattgagtacttaagtgacttaagtgagcgggatgggtaggagaatctctcaagtgattgaacttgacacatgagtcggacacatctgttttcttatcagcactgccactccctgggtttgtcactttgaaaagatttgttcacttatattgacttcagttttttaactctaaattgcaattttttagtagagcttgaaaggtaagaaaatatttacaaagcgcataaaagaggtgggcttcagaaaaatctatcttttttttttgttaaaaattctcatgtacctttttctttcttagagtgagtttagaaattttctcaggcttttttttttttatggctgggtgatttcaaacagaattccaaggcttagattttggaatgctaccaaggaaaagaatagggaaaaatctcttccattttggctgtagaaaatgaatgcatttccagaagaaaatgttgtagataataggtgagttacatgaattcatgaaaacatcagttgtttttgcaggataaatttctgacagtgaatatctctgttctatatcctgttatctttatttcagagtttaatgctgtattttttagatgaaacttggtgcctcctagaagtgttcccatatgactaattgtttactacattttttttttttttgaaatggagtcttgctcaaggctggggtgcagtggtgcgatcttggctcactgcaacttctgcctcctgggttcaagcaattctcctgcctcagcctcccgagtagctggaactacaggcgcacactgtcgcgccagcctatttttgtattttagtagagacagggtttcgccgtgttgcccaggcttgtctcgaactcctgagctctggcaatctgcccctcctaaagtgctaggattacaggcatgagccaccttgcccggcctactacatgattttttaatggaaataataaaataatacatttataaaggaatagatacttttgcttttcttattgaggtatgaaatgtaagcattgtaaaattgccttgttttatatgaacattgagtaattttgctggatttttcgaacacttagtttcaaagaccaagtgaataactctgacacggaaattaaaacttgagcccagtgactccaagctaaggctaatattgagcctgcaaaagaaggttatttaagatccagttagttctttctggggagcctcccctgcaggtgtccctgcctgctcaccccagccatggaaggaggctttatcctgagagaagctacagagccctggaaagctgggaacccacaggcagatacagttacagttaaggtggaagggaactgggaggatcttactgaagataaagttgtccttgttttgagacagtttttagactttgtaaagtagaacaaagttagatttgtataaaaaaaagaaaattgaattaccaaggagtattgcaacaggaggaaataccaaccataagagctttaaggattgcaaagtttaggcagacaaagcctttcttttctttttttaataatttttttttttttgagatggaatcttgctcttgttgcccaggcaggagtgcagtggcacgatctctgcttactgcaacctccacctcccgggttcaagcaattctcattactcagcctcccaagtagctgggattacaggtgcccgcgaccatgcccggctgacatttgtatttttagtagaggcggggtttcaccatgttggccaggctggtctcgaagtccttacctcaggtgatgacaagggctttctttcataggggtgagcaaacaagattagaaaaaagatgggaggggaacggcaaatggacggtaaaaacatcagattctagatcagagaatgttttatcctgaggtcagcatgttcttagaagggaagtagaatggggttgtatgttggctcagacggagggcagcccaaagtccaggaacctctgggaaggagataaatttcagcgaggtctgatatggaagtacaggaaagtggtcccaatccaggctccaagatagggttctttgatcacacgcaagaaagaatttagagtgagttcatagagtaaagtggaagcatgtttattaagaaaatagaggaataaaacaatggctacttcacagacatagcatcccagagggctgctggttgaccactttatggtaatttcttttttttaattttttaatttttttttattgatcattcttgggtgtttctcacagagggggatttggcagggtcataggacaatagtggagggaaggtcagcagataaacaagtgaacaaaggtctctggttttcctaggcagaggaccctgtggccttccgcagtgtttgtgtccctgggtacttgagattagggagtggtgatgactcttaacgagcatgctgccttcaagcatctgtttaacaaagcacatcttgcaccgcccttaatccattttaccctgagtggacacagcatatgtttcagagagcacagggttgggggtaaggtcatagatcaacaggatcccaaggcagaagaatttttcttagtacagaacaaaatgaaaagtctcccatgtctacttctttctacacagacacagcaaccatccgatttctcaatcttttccccacctttcccccttttctattccacaaaaccgccattgtcatcatgacccgttctcaatgagctgttgggtacacctcccagacggggtggtggccgggcagaggggctcctcacttcccagaaggggcggccaggcagaggagtcccccacctcccggatggggcggctggccgggcgggggctgaccccccacctccctcccggacggggcggctggcccggtggggggctgacccccacctccctcccagatggggtggctgccgggcggagacgctcctcactgcccagatgggacggctgccaggcggagggtctcctcacttctcagactgggcggccgggcagagacgctcctcacctcccagacagggtcacggccgggcagaggcgctcctcacatcccagacggggcagtggggcagaggcgctccccacatctcagacgatgggtggccaggcagagatgctcctcacttcctagatgggatggcagccgggaagaggcgctcctcacttcctagatgggatggcggctggacagagacgctcctcactttccagactgggcagccaggcagaggggctcctcacatcccagatgatgggcggccaggcagagacgctcctcacttcccagacggggtggcggccgggcagaggctgcaatctcggcactttgggaggccaaggcaggcggctggaaggtggaggttgtagcgagccgagatcacgccactgcactccagcctgggcaccattgaacactgagtgaatgagactccttctgcaatcccggcaccttgggaggctgaggctggcggatcactcacggttaggagctggagaccagcccggccaacacagcgaaaccccgtctccaccaaaaaaatacgaaaaccagtcaggcgtggcggtgcgcgcctggaatcgcaggcactcggcaggctgaggcaggagaatcaggcagggaggttgcagtgagctgagatggcagcagtacagtccagcttcggctcagcatcagagggagaccatggaaagagggagagggagaccgtggggagagggagagggagagcggtaatttcttgattatatgctaaacaaggggtgaattattcatgcctcccctttttagaccatacagagtaacttcctgatattgcattggcatttgtaaactgttatggcactgatgggagtgtggcagtgaggacaatcagaggttactctcagggccatcttggttttggtgggttttagctggctcctttactgccgtctgttttatcagcaaggtctttatgacctgtatcttgtgccaacctcttattatgcgacttagaatgccttaactgtgggccatgcgcggtaatttcagcactttggaaggctgaggcgggtggatcacctgaggtcaggagttcgagaccagcctgaccaacatgatgaaaccccatctctactaaaaaaaaatataaaaattagctgggcatggtggcgggcgcctgtaatcccagctacttgggagacagaggcaggagaatcacttgaaccggggaggtggtggttacagtgacccgagatcacgccactgcattctgcctgggcgacagagcaagactccatctcaaaaaaaaaaaaaaaaaaaaaaggaggaaagaatgccttaactgtttgggaatgcagcccaataggctctggtttaaatgcctctgacagaagtattttatttttaccactgaagtcaaattcagctaccatttttatgagagcaagaagaaaatgtgcagagtctatgtctggcttatgtgacaggtaagaatagagagcaccatctaagtcttttttttttttttgagatggagtctcactctgtcttgcacgctggagtgcagtggcgtgatctcggcttactgcaagctccgcctcctgggttcacaccattctcctgcctcagcctcccagtagctgggactacaggcgcctgccaccatgcccggctaattttttctatttttcagtagagacagggtttcactatgtcagccaggatggtctcgatctcctgacctcatgattcacccgcctcagcctccaaaagtgctgggtttacaggcatgagccactgcacccggcccttagtcttaatggtaatggggtttctttccataaactgtttctggcacacaaaggatagagaattttattaatcacagctgttttctcggattatccacgtgctttttattttcccacctcttttctttgtcctatacatttcttccatttgacttctcctggattttatcttttataataaaccagtaaacataactacagtgtttgctgagttctctgagtagctctgtccaattattaaacttcatagaggttatgaaagtcctgaatttttaaacagctcagaagcatagatgggcccatggggtttgtgactggcatctccagtaaggacaatgttgtgggaccaagccctgaatctgggtctctgctgactctgggtggtgtccaaattcaaatgttagacattgagttgctgttggagaattgcttggtgttaagcaaactctacagatttggtgccagaagaaagatatcacagaggcctgtcctggaataaaactcttggtatctggaaatgggaggctctgctctcctgtacacaggctttcacactgcccattgtcctgtgattccaggtgtcctcttagggtaagagaggatgaaaacttagagggaacgatctctgatgacagactcccttttcctgcagctgccaccacgtgattcccacccactcacatacacacccactagacattgacatgtccacatccctcccagaatgaagcaccaccctcaggaacttcaccacagcatttttgatcccagtgttccttcccagaaatgcacaaaagtgtctacaagtctcctggaatattcctactcccagacacaatctgcaacagcaacctgtttttctccaccaacttagggttctgggccacctgtttgtaatctcatctgcctccatggacctagaaataaatcagtacagccccacctggaccattatctgtagcacaaaccagtcttttcacctacatagtactctcccccaactaatgaagttttttccttttaacttttatttttggtctaggggtacacatgcaggtttatcatatagataaaattgtgtcatggaagtttagtgtagattattttgtcactgaggtactaagcatagcatcaaacaggtatttcttattctctttgtcctcctaccctccaccctcaactaggcctcagtgcttgttgttcctctctttgtgtccatatgtgcttgttatttagctcttataaatgagaacatgcatttggtttcttttttctgcattagttttctgaggataatgggcttcacctccattcatgttgctgcaaaggacatgatcttgttcttttttttttaaataaccacacagcattccgtgatgtttatataccatgtatattttatacacacacacacacatatatatatttttttattttatttttgagatagagtctaggtctgttacccaggctggagtgcagttttacaatctgggctcactgcaacctccacctcccagattcaagtgatttctcctgcctcagcctcccaagtagctgggatcacaggcacgcaccaccacacccagctaatttttgtatttttagtagagacggggttttgccatgttggccaggcttgtctcgaactcctgacctcaagtgatctgcccacctcagcctcccaaagtgctgggattacaggcatgagccactgtgcctggccaccatatatatttttatttttttaaattattttattttgttttatttcattttattttttgagatggtgtctcactctgtcacccaggctggagtgcagtggcgtgatccccgctcactgcagcctccacctcccagattcaagtgattctcctgcctcagcctcccaagtagctgggattacaggcatgcaccaccacgcttgtctaatttttgtatttttagtagagacagggtttctccatgttggccagactggtctcgaactcctgacctgaagtgatccccgtaccttggcctcccaaagtgctgggattacaactgtgagccactgtgcctggcctttttttttttttttttttacttttttatagtagccattctgactggtgtgagatggtatctcattgtgatttttctttgcatttctctactgattagtgataagaaagaaatactcatcaaatgcttgttagccacatgtatatcttctttagaatggcatctattcatgttttttgcctactttttaataaggttgttttttcttgtaaatttgtttaagttccttttgaattctggatattagacctttgtcagaagcatagtttgcaaatattttcttctattctgtagattgtctgtttactctgatttttttttgtgtgtggtgttttttgttttttgtttttttgctgtgaaaaagctctttaattaggttgcattcatcaaattttgcttttgttgcaattgcttttggtatcttcatcataaaactttgccagttcctatgtctagaatggtatttcctaggtcatcttccagtattttttaagtctttacttaatcttgagtatatttttgtatatagtataagaaaggggtgctgtttcagtcttctacataatgttagctagttattctagcactatttattaaacagaaaattcttcttacgttcctcttgtcagctttgtcaaatatcagatggtcgtaggtgtgcagcattatttctgggctctctattctgttgcattggtctatgagtctgcttttgtaccagtaccatgctgctttggtttctatcaccctgcaatatagtttgaagtggggtaaagtgatacagtgcctccagctttgttttttgtttttttgtttttttaaatttttttattttttttattttattgagacctagtctcgcttaattccccaggctggagtgcagtggagcaatcttggctcactgcaacctctgcctcctgggttcaagcaattctcctgcctcagccccccaagtagctgggactacaagcatgtgccactatgctctgctatcatcatcattattattattattattgtatttttagtagggacggggtttcaccgtgttagccaggatggcttcaatcccctgaccttgtgatccacccgcctcagcctcccaaagtgctgggattacaggtgtgagccaccatgcccagccgctttgttctttttgcttaggattgcattggctcttcgggctttttttgttgttccatatgaatttaaaaacagtttttagttgtgttaagaatgtttttggtagtttgatagaaatggcattatttctgtatatttctttgagcagtatggttattttaatgatactgatttttttctgtccttgagcataaagtagtttttgatttgtttgtgttagttctgacttctttaagaagtgttttgtagttcttgtcgtagagatttttcaccaccctggttagctgtatttctagatattctattctttttgtggcagttgtgaatggaattatgtttttgatttggtttttggctcagatattgtggatgtgcagagatgctgctgatttttgtacatgtattttgtatcctgaaactttgctgaagttgtttttcagtctaaagagcttttgcaccaagactatagggttttctagatatagaatcatgtcatctgcaaacagggttagtttcctttcctctcttcctgttgggatgcctgttatttatttctcttgcctgattgctctagccaggacttccaattctatgttgaataaaagtagtgagagaagtcatccttttcttgtgccagtttttaagaagaaatgcttccagcttgcgtccattcagcaggttggctgttgatttgtcacagatatcttactattttgaagtatgtaccttcaatgcctggtttgtttagggttctaaacatgaagaatgttacattttattgaaagctttatctacgtctattgagataatcttgtgttttttgtctttagttctgtttatgtgatgaatcacatttattgacttgtgtatgttgaacccaccttgcatcccagggataaagcctacttgatcatagcagattagcttgttgatgtgctgctggattcaattttacagtatttcattgaggatttttgcatcagtgttcatgaagaatttttgcctgagttttcttttttttgttttatgtttgccaggttttggtatcagaatgatgctgttactatataatgagcaggggaagagtttcttctcaatttttttagtagttttagaaagtataataccagcttttctttgtacatctagtagaattcagctgtgaatctgtgggtcctaggctttttttggctggtaggctatttactaattcaattttagagcttgttattgttctgttctgggctccagtttctttctgtttggtattgggagaatgtatttgcccagaaatttatccatttcttttagattttttttttagtttgtgtgcatagagatgtttatagtagacttcagtagttatttgtatttttgtggggtcagtagtaatgacccttttgtcatttcctttttttttttttttgatatggagtcttgctctgtcacccaggctggagtacagtggctcgatctcagctcactgcaagctccgtctcccaggttcacgccattcacctgcctctgcctcctgagtagatgggactacgggcacccgccaccatgcctggctaatttttttttatattcttagtagagacagggtatagccaggatggtctcttatctcctgaccttgtgatccacccacctcggcctcccaaagtgctgggattacaggcattgtcatttcttattgtgtttatttgaatcttctcttcttacttcactaaacttgctagtggtttatcttattgatttatttaaaagatttaactcctggatttcttgatcttttgtatgacttcttatgtctaaatctccttcagttctgatctgattttggttatttcttgtcttctgctagctcaggggctggtttgctcttgcttctcttatacttttatttatgatgttaggttgttaaattgagatctttctacctttttcatgtgagcatttagtgctgtaaattccccttttaacctcacattagctgtgttggagagattctggtggtgtgttgtatcactgttctcatttgttttaaagaacttcttgatttgtgccttaatttcattatttacccaaaagtcattcagatgaagattgtttaattttcatgtaattgcatgttttcaagtgtttttctttgtactgaattatatctttttttttctttttttgagatggagtcttgctctgtcgcccaggctggagtgcatggcaccatctcggctcacagcaacttccacctcccgggttcaagtgattctcctgcctcagcctcctgagtagctgggactacagatgtgcaccaccacgcccagctaaatttttatttttttatttttagtagagaaagggtttcactgtgttagccaggatagtctcgatctcctgacatcgtgatctgcccacctcagccttccaaagtgctgggattacaggcatgagccatcgtgcccagccctgtattatatctttatctttatcaagttgtggtctaagtgagcatttggtatgattttgggattattgaatttgctgaggattgttgtgtttctgattgcgtggtcaattttagagtatgtgacacatggtgatgagaaagatatatatactatgttggtttcagatgaagagtttcatatatgtttattagaatgatttggtcaagtgttgagtttaggttctgatatctgctaattttctgcctcaaggtgggaaattaaagaaaataaaattaaattaaaaagagaaagaaacaaggtttcctgtattaggctgacttatcctagaggcagtaacaggcacagcccacatccaggaaaagttttgataacactatttaagaagccagggctggaaagaatgtgctctggagactctcccagcattccctcaacatagggagaagagaaacaaattttcctttctcttatgattcctgtttttcatttaagcagcacattgaaggtcatgagatgcctgagcaggcctggattgcagccacctaggcaccatagtgaaggttataagataagcccatgcaaggcactagagcaagcctaggtaacagccatctgggccacatagtaagagtcatatgtaagtctgagttataaacctgtcatagtatgattaactgcttttgttctgtttctgtatccttgctttcacatcactacactttgtgccactgtaggcttgtttcaagttagcccaccctctttagaagtgtatgtaaaagttaaatgctgtctttgtccttggcccagtctctggatgttaatccactgggtctgagtgcactcaataaaatcctccttttctacctatcggtctttccagtctcctaattcccacaacacagtgatctaagtgtctgcggagtgttgtagtctcctattattgtgtcagaatctacatctctttataggtcttctaagaacttgctgtattcatgtgcacccatgaatttttttttttttttgagacagtttcactttgttgcccgggctggagtgcagtggcatgaactcagctcactgcaacctcctgggttcaagcaattctcgtgcctcagcctactgagtaactgggattacaggcacctgccaccatgtttggctggtttttgtttgtattttagtagagatgaagtttcaccatcttggccaggctggtctcaaactcctgagctcaggcagtccacctgcctcagcctcccaaagtgctaggattacaggcatgagccactgtgcccagccaacacccatggatttttttagaacacctttttctcttctgctttttccttcataaacattctttcaagtgtacacagggtgcccaaggctacaccttagatacctgaatccagtgtctcctaaaattcagatgtccaagggttcagggacatgtccagagacttggttgttgtaggagaaaatataaattagaaataagaggctttattctcctacctgaaaataatggaagatattttgttcttttttcttaaagcatttagattatatgtagatatttttctctgatttttggaaatatatgtaaatcatagtaacagctaaataaaccatttgtcatttttttttgactcaaggttgtctttctctaggacctcataaccattgctttgtttttgctttgggaaaggttttattttattttttcatttttagtcttgtaaagtagacacagagttgtttagattaaagctcattttaagagtacacaaaagttgagcacaaagataataaagactagaaaatactaagttcctttgagagaaaactgattatccagggtaattatctgatatttgcagtccaaagtacttacacagaaaaagcaagagcagttcagtgtataaactgaaaagtggaatctgtagttgtactttggtttctatttattacttcagaacaattaacatagttattatgtgtagtgtttgtcaacaacctgcactcatattaatagcattttctataatagtatgaatataaggccacaatatttactttgaataccttaaataggcacttcaatattgttctttttacttttgaaatatagtgttttaactgaattatggttacagacaatttttaaaagttctacagacatcatgactagtacacaaaaattatttatacatagatatttgtatctaacatcaaaggaaaactcactacaaaattgttacagtagatattagtctgaaatgctcattagtttccccaaaaggactaattatatgtgagcatggtttcagtgtcttatttcactaaatttgaatgctgctattacaggacaaatcaacatgatgagtgatgtggccacccaaaaccataatagctctttagttaactatgtttcaatctcagatacattccactatataaacaaagtcaggttccagttcttatcaaaaagctctagtggaagttgtcacatgtatttcacaatagatcccccatttgatggctaggagataaaagagcaacagacatgaaagaaaaaccttatgaaattctactgagaatatgccctttttcttcataatgctcatgtttctcatgctgacaatagctgtgcattttgggtgttttcagagaaattccttttaggggaatattttctggcctacttgatcaatcttgtatctaatctgagttttcttcttaagatgcttttaacttagtttgttctcagtagaatcttgctgagatggagagctgcttttctctctcatgctttggttgtctgtttcagaaggcctattcatatcctgtggtttgtgtgaattaggtgggctgtcacagtgagaactcttggagcatctgcacttatcctggaaatccagcagtattttttaatgtcacaattataactagaaactgaggctgaaacactgctcccattcccattattatgaaggcacaattctatccaggaggcctacaggatctcctcatgcagctcaggctttactctctgatgtggcactggagtgctgctatggcaattggggttcatgtatgatgtgagctgccagctgtgagccctgtgctgtgagctgtgtttcagtggcagatggtaggagtcgagaggacactcgtcatcaggagagggtaagcaggagtgctctagcccagtgcttagggagtagaggagccattgctttaaaatgtaaatagccaaaaagatagcaccccatccagccatttctgcaggagagtgagagcctaccttcagcagccacctgctttcaagttggaatattacctcctgtcgtgaagataggaaaagtttattttgtcattgactataacccactggcatgcacagatggcctctcaaattaccaggtaaatttaggataaactctgtatgacatggtgctgtaagttcttccacttgtggactaattataatgactatttttctgtctttgcagtctcttaagcaaattgactgtggtgcatgtcacattctggtttacttgcatataaaaactcttttgttctatcattatggagtttctctgcagctggatacaatttttcttttaattatattttccaaacactatctagaattaccatacatgatataaacatattaggtgccagccaggctttactctagagggtacttttcctctcaggcttccagtcaactcacagttgtgctgcaaagtgcatgctgtcactgggcatctctaatcccagcactttgggaggccaagatgggcagatcaccttgaggtcaggagtttgagaccagcttggccaacatggtgaaaccctgtctctaaaaaaatacaaaaattagccgggcatgatggcaggtgcctgcaatcccagctacttggaggccgagacaggagaattgcttgaacccaggaggcagaggttgcattgagccaagatcatgccattgcactctagcctgggcaacagagcgagactctgtctcaaaaaaaaaaaaaagtgtatactgtcccgtaaatatgcaggcagaatcatgtctctttgttatctatagtcctctacagtcacttctagagggattagatttgtacaaatgttacagggtggaaatcaaccattttacctctttcaatgactcttgtgtcttcaaacctgaaactgattaagagaccatggagccaagaaaccaaatcagagtaacacgtgtgcattgagtagacatgtggacatgagaatctccactttccccttcctcctcttggtaaactgctcacaaatgttcaggtaacatctgctactgctactccacctattcaggacctaaatctgcagatggaaattctgaatctaggtcatgagatttggaaaacagaaaatcttttatctgaggaatgcaaatcctctttttaggtcggggcgaaagttattgcggttttaccatttaatgtaatggcaaaaaccacaattacatttgcaccaacctaatagttgtcaaactcggagagacattaaaatgagaacacaattatgtctttctctcctctttgaaccatatagttatctcttgaaattgtttactattgccaccagtggctataaattaaactgatagtgccacactggacactatagcccatactctaaaccctaacgatgtacactcaatcagtaatcaatgttaattctgtaaataaataagaatttctcacagacaaccttttatcaggccacactctgtccctctctctttgcctttgcaaatccacttgtaagtgctgctaattgaagtgtagattccagtcaacttgaatctttgcccgcagtttacaatcctcaagcttggcccaaataaactgcctacttctgttcatgttgcctcatcttctaccttctagatagatgtataatctagagtgtgccagagcagcctctatgaggagatctctcctttgattgttgtgtgcttgctctaatacccaaggatgcagagccaggttgatcccatctaggatctgcacataaggccaggcctcttcttgggatttacaagacaaggccacactttggattcagaatgtaaaaaaaactaacaggaggcatcttctgcattgtgagatgtcaacatgggcattttaaagacatcttttgagagtgtggctctttgagcttttcagatcttgtccaatgacctgcttcagttgtgtgagaggcttctggtataaatagaatctaatgtcagattcagtaagtgtaaacaagcatcgtaggagtgagatcaaggccacaaagtatccagagccataacacaactatacctacctgtaaaatgtgatgctgggccaggcgtggtggctcacgcctataatcccaggactttgggagtccaaggcagacggatcacgacgtcaggagttggagaccagcctgaccaacatggtgaaaccccatctctactaaaaatacaaaaattagccgagtgtggtggcacatgcctgtaatcccagctgttcaggaggctaaggcaggaaaatcgcttgaacctaggaggcggaggttacagtgagctgagatcatgccactgcactccagcctgggtgacagagcgagactccatctcaaaaaaaaaaaaaagtgaacactgtagtagagtattcttgtccttcctcttacccaagagctagcaaatcaggacgggtgatccaggttctggagctctgccagggcagttccattttctatttagaatgagcctgagtctcttctgcctttcttattattgggccatcagcacagggtcactgggaaccctctctcaattagctaggtatatttcagacatttgatgatgtccagagcagaactgtgtcaggatgataagagtggttaattccgcttctgtttcaatgtaagagaaatgaatcatcttgtgtttgtttctttcctcatacaagagatgtgtttggttggtacccagatgagagtttctctagttttctggtactttgggtaaaagacgaggaggaggtctggagactcaaagcagataaactaattgcttcattaatatgaccattagaaaaaaaatgaagcagtcatggtccctaccatccaaaaactcttggtttagactatcaactggataaatggttgaatgaagcatcatatggttggtacaatgaatacgtgtgtgcaaaaaaacttgggctttatttgggccactttctttacattgttgtaacttctgatgtcatcagctgaagggatatttatggacagaagaatttttattattatttctatttttcttaccttgttaagaatatatatttatcttctaataaaattaccctagaaaaccttaagagatttgcttaaattgcttattagtatatgttataaaattgacagcacagtagctaaaaaaaattaaaattacacaaactctggaatttaagtttttcttaggtaagtctaggaaaaacagaactggaagtacccccactggcatagagaacagaattctacacagggtccactctttggcccagttctgttcagattcaccctttttggatgccttattttggtctggccccactctggagccttgcctcacagaactgattagaagagatcagagttttgggtggtatattttgctacctttctagagctggtgctctgatttcgtgaaactcaaaagcagataagtggaaaaatacgtatttttaattttttattaaaatcagtgcttaccaagacattccatttagcaacttgttttctattcctgcagatccagtagttgctccacaagtcacaataaattaaatataaacacaataaaaattcctctaaactacattaaactcttaatttctgtattcctctcatctgtctatatttagcttttattctatacattttattttttaaaaatcaatgacagagaaacagaaaaattaaaattctgggtcctttatctaaatcctgggaattattaaacacttagtaccaactcccagggtgttatgaggatgaaatcacacagtatgttatgcccagcacagtgctctgtaacatactcttgagcacatagtacctgcttaacaaacattgcattagtacctgtgcatatgctatttttcaaatgcagactcattcagacattgctgccttctgtttgttctgtaaactttattttactatttttttcaggtttttgagaagctactttaatctgttatgaaaagagaggtttcttcactttgacttttttttttccataagtcactggtgtacaggtagtatttggttacatgcataagttctttagtggtgatttgtgagattttcgtgcacccatcacccaagcagtttacactacacccatttgtagtcttctatcccttgccctgctcccactcttcccccaaagtccccaaagtccattgtaccattcctatgcctttgtgttttcgtagtttagctcccacatatcagtgagaacagaaaaccttttatctgaggaatgcaaatcctcttgttaggtcggggcaaaagttattgtggttttaccttttaatgtaatggcaaaaaccagaattacatttgcaccaacctaatagttgtcaaactcagagagacattaaaatgagaacacaattacgtctttcctctttgaactatgtagttatctcttgaaactgtttactattgccaccagtggctataaattaaattaatagtgctgcactgtgcactataacccatactctaaaccttaacgatgtatatatacccaattaataatcaattttttttgtaaataaataatttctgacagacaaccttgtatcagcccacttgggggtgtctctcaggtcctgcaggagcagtctgcttccttcagatggtctgtgggtcctcttgggattgctagtttgttcttgcagtcaatctggagctaaaattcacactgtgaacctccacacacttctctgtccaagtcggagctgcaatctagtcctgcctcccatccaccatgactgagcccattccactttggctctttaagtaagtaggccacctgttctgtaaactttaaagagtcagcaaagaatatgatactttagtgtacagatgagttgtcttcatttgtatcagaactttttgtgttgtgacaagagtcctgagtggaagggactctgtgctgtgcctgctttgtctaactaatactaatggtgagcccagggggagttacatcagcaccgatgggacttgtttaaaacactcattttggacccttttcagacctgcagaatcacattatgtagaatggggtcaaaattaccaagtgatttataagctcattacagctcgaggggcaatgctttgccaagtggttatcagccggggtttctaattagaattccacagccaatttacaaaaatctctttacttgtgccctttcaacaggttctgcatagaagcatccatgttgttttaattaagtgcctcatgtgattctaaggtgaggccagaatcaagtatgaaagcttcaagacacattcatgagagttccacctttgcactaaagggtggttacagggcctgttctgtttgggtttggtagggacagggcagtgcagtccatactaccaatattgtagcagaaactgctgttgtctgtggcaggggagggcacctgaggacaggaaagaagaaatgtgtctccatggaacagtgcattgttcctaaatgtctgttattaagaacagaaatgggtggactttttttgcaagtcttgattcttctgcctgtgggtgtggtggcagcaggtaaacaggttctgttgacattttaaaaggcatagtctcaagatgcaggtgtgatttgtttggagcatgtcatctgagcaggaattttacagaaattggaaaaagaagaataaatggcgatttttcagctaatcatgtcccagatcaagagctgtgtccactctgcctcctggactgtcatgcatttagtacttgcaagcctttacttctctacttgtatttttcctccctaatgagtttaactactttttaaaattcttatgatagtcaagggtctctgaaaaatatttccttcctacataccagatctttctctacattctctacatcatagctttttatgtgccatgcagaattctcaccgattataaattaatctgcaatattaaaaatgttctcttgtggctgtgaaacaggaggtgtggatactcaaggtttctattagggaaaggtgggggtcctcagtaaagatggagaacatgtaatgttgaggttccatctgtgttctccattggctttatgcagaacaggattttcaaaatgcttatttaaacaggatggcatttatcacccagaaagttctaaaaaataatatatattaggaggtacctgttctctagagtgctaaaaaaagactactttaaatcattactaaaaattatagaacacttgactgggtgcagtggctcacacctgtaatcttaacactttgggaggccgtggtgggtggataacttgaggtcaggagttcaaaacctgtctgaccaacatggtgaaaccccatctctactaaaaatacaaaaattagccgggcgtggtggcaggtgcctgtaatcctagctactgtggaggctgaggcaggagaatcgcttgaacccaggaggtggaggttgcagtgagccgaaattgtgccattccactccagcctgggggacagagtgagactccgtctcaaaaaaaagaaaaaaaaaattacagaacccatgagtcatcagtaccttaaactttgaataaaactgatgtttctttatggttaaattcagactgtaatctacttttaggtagcaagatcacatcagtgaggctatgtctttctgtatgcaccagcacatcataaaaatttgtcctagtgcagttgatgttaatgattcacttggttaaagaactctctgacagactgttttactatagagttgattattttttctttattattaactatctttatgcagctgatgccatcacatttaatctggcagctgcccttcttccttaggttttctttgcatatatctgtctttggaaaatgaaagctctcatctttgtttacaggacaaaaaaactgggaaaaacacagcttccttcatttactgaatgtttgacaaaatattctttttggatcaaaaacattggcattactggtgagcttgttagaaattcagcaactcagactttattccagattttctgaaaaaataatctgcattaacaaaatcttcagttcattgaacacattaaaatgtgagaggtaaattctaactcaacatgtctttttgatctgaaaaatatacacaactcattctgtaagatgtaaacatagcactcaaaaatgtatgtttctgttcatgcccttaattttatactttatcacttagaaaaatgtcatgtgtacactgatgttgtggatcttatgccactattttctcaaagttagagaatatattagagaacatttctgtttataaattagtttattgaataatttcagtcacttgtataagtcagaagcagttctctttactctctcatttcaccttgaattaaataaaaaattctacccatgggcacttggtcaatatatttctctctctttctctctccttctgttggtgtgtgtgtgtttcagggaccattgacatttacagatgtggccatagaattctctctggaggagtggcagtgcctggacacagcacaacagaacttatatagaaatgtgatgttagagaactacagaaacttggtcttcctgggtgagaataacttcaatacaacattcctaatataccctaaatgtttcatttctcctctttgtagaatgttctttggtaatttatgctttgcataaatgagtttcagattcctgcttttaagaaaagtttggggccgggtgtcttggctcacgcctgtaatcccagcactttgggaggccaaggcgggtggatcacgaggtcaggagaccatcctggctaacacggtgaaaccccgtctctactaaaaatacaaaaaattagctgggcacagtggcaggcacctgtagtcccagctactcgggaggctgaggcaggagaatggcgtgaacccgggaggtggagcttgcagtgagcggagatagcaccactgcagtccagcctgggcaaaagagcgagactccatctcaaaaaaaaaaaaaaaaaagtttggggatttgttcatgtagaaaagaatttcttcaagatgttttgtcttcacctgaactttccatattcctgagctgatttgtattatgtactcttgattagtgataatttcaggaatttggtggcctaaaatattgttgcccacaccttaaaatctaattgtcacaatcgattttttattaagtagtactgggcaatgaaattaagaacctaaaaattttaaatattttctaaagatttagaaatttctcttataaattggtatttgggcattaatttactagaatattatattacatcctctttactgagcacattactaaattggtaattacagaatataagcaagattcatcttctttatttttaataaaacaggtattgctgtttctaagccagacctaatcacttgtctagagaaagaaaaagaaccctgcaagatgaagcgacatgaaatggtggatgaacccccaggtaggtgagagtgaacacaacagacaacacagatgagaggtcccaaggccaataagaaagccagtccttaacaatgtgatttgggaagctatgtttcaaagaaaatattttctgaaaaactgtgttctaaaaaactttcagcctggcacagtggttcacacgtgtaatcccagcactttgggaggctgaggtgggcggatcacctggggtcaggcatttgagaccagcctggccaacatcatgaaactgcatctctactaacagtacaaaagttcactgggcatggtgtcacatgcctgcaatcccagcttctcaggaggctgaggcaggagaatcgcttgaatctgggaggcggaggttgcagtgagctgagatcacatcattgcactccagcctgggcaacaagagtgaaactccatctcaaaaaaaaaaaaaaaaaaaaaaaccaaaaaaaaaaaaacacccgtcttggtgactgccctacagagcaaagtcctgaagaatattcattctgttgaaaaataaaatggggattaacaactaccaaaaccccttgtaacaagccaactaaaggtggaccctagtacagaccccgcagccttgtgaccaagctacaacccctctctattacaaatccatagggcatctcagcaccctggggacccaacaaaagaggcttacctcctgaggccagtttataaaaaattgaagaggtgtctgcttcttcacattcacagacaccaatgcaaaactgtattgtacccattgttaatgcctctattttaatatagtactggaagtatgtggcataaatattagtcaaaaaaatagaaaataggctgagcacggtggctcatgtctataatcccagcacttcaggaggccaaggcagctggatcacctgaggtcaggagttccagaccagcctggccaacttggcaaaaccctgtctctactaaaaaatacaaaaattagctgagcgtggtggcaggcacctgtaatcctagctacttgggagactaaggcagggagaattgcttgaacctaggaggcggaggttgcagtgagccaagctcatgccactgcactccagcctgggtgatggagtgagactctgtctcaaaaaaagaaaaaaaaaaaaagcattgaaattgaagacaagtaaaaagttgctgtttgtagattatgtaatctgacattaaaaaaccataaacagtacattaaaacctgtctaaactagtaaatgcccttagtatattagcaacatacaaaattaacatacaagtataagttatggttccatacacttaaactatctgatagaagagaggaagaaaacaatcttatttacaatagcattagagtaataaatttctgaaaacaaatttaaccaaggaggtaaaaagtatttacaattaaaaatatatcaatgaaagaaatttaaaaagacgtaaattttaaaatattttgtatctatggattgaaacaataaatatttttgaagtgccatattattcaaagtgatctatagattcagtgaattcccaatgaaaatttcagtgttttttttttcacagaaatgcaattttaaaatttacatgaaactacaataaactttgactagccaaagcaatcttgaggaaaaagaaagcaaaagaacatcatacttcataatgtcaaactatatttcaacactatagtaatacaaacatagtggaatgtgcagaaaaattaacaaaaaaacactactggaacagaaaccactactctcaaacattttagacataatacaaaaagagaatctaaaaagtagtttaacaaagagtttttcaaaattaggcagatacttgtttgtcccccaaaacaatgaaaaagcagtcagattatgcagtatattatatgccatgaagagggttttggctcactgtaagcttgaacaaagatcactgaggggaaagtagaatccttaaaaaatataaaagcataagacagaagatgcctctatgtgagaggattttttttttttttttggagacggtggtctcgctttgtcacccaggctggagtgcagtggtgcagtcttggttcactgcaacctcggcctcccgggttcaagcgattctccaacctcagcctcccaagtagctgggactacaggtgtgtgccaccacacctggctaattttgtatttttagtagagacagggtttcaccctgttggccaggctggtcttgaactcctgacaggtgatctgcctgcctcggcctctcaaagtgctaggattacaggcatgatccaccttgcccggtccaaatttttttttttttcatttctaagtatttgagaaacataacattttaaagtaatggctgcattcttgttttccacaatgaacatgggtttcattttcattgcatcatcaacagctttggtgtttttaaaaaaatttacagtttccattcttaatggatgtgaggtgattttggttttcattgttattttcatgcatatctctacaaattagtgatcttgtgttcttaaatgctttttttccagttgtgcgtcttttttgatgaaaatttagttcagttgttttcccattttaaaatcacattattcaactttattgtttagtttcaagaggtgtttatatattctgaatattaaatcatatccatgtgatttgcatacattttcatccatttcctaagagacattttcactgtattgaacgttttctctgatgtgcagaaattttttagtgcagttaaatttttctattttctttcttgctcatacatttaatgttgtatctaagaaaatgcggccaagtccaatgtcatgtctttcttctatatttttttctaagggatttgttagtggttctttttttttttaatgtccaagtattttatttaaaatgttttttgtatatggttcaaggaaaggacccaactttattttaccagtgtttcttttgttttttttcaatacagagtcttgctctgttgcccaggctggagtgtaccggtgtagtctcagctcactgcaacctgtttcccgggttcaagcaattcttctgcctcaacctcccaagtagctgggattacaggtgtatgccaccacacctggctaatttttttgtatttttagtagagatggggtttccccatgttggctaggctgtattgatatccagtttccaatattattttttaaagagattttcttttctctgttgtgtgctcatggcacacaacagatcatatacagaagggtatatttctgtgctgtgtattctattctttcatctttcatctgtcttgtcagtaccacattgtttttgttactgtagcttttaatatgttttgaaatcaaaaagtataatgcctctttattctttttcatgggtgtttggctatagtttatgatcaaattttacaattttaaacaatatttctgtaaaaaactgtgctattgggattgtttagggattatattaaatgtgtttatcactgtctgttgtattgacatatttgaaaaattaaatttttgacccctaagcaagaaaatgttgaagagcatgttttattttcatatatttttggattttccagttttacttttgcttttagttcctagttttatttagttttggccacaaaacatagtgtgtaattttggtcttttaaattttatttgttgttttgagacaggagcttactctgtcacccaggttggagtacagtggcatgattttggctcaacgcagcctcaacctcctgagctcaagtgatccttccatctcagtctcctgactacagacatgcactaccatgtctggctagtgcagtttttaattatttgtagggacaggatttcactatgttgcccaggcctggtctcaaacttgtggctccaagtgatccttccaccttggtgtctaatgtgttgggattaaaggcatgacccactgtacccagccaatattcctaaatttagtaagacttgatttgtgtcctaacagaatacaccaggtgcaaataaggatattttgcttttgactggagagaatctcttgctttcagctggaaagttgttttttgtgtttttttttttttgttcgtttgtttgtttttttttgagacggagtatcgctctgtcgcccaggctggagtgcagtggcgtgatctcggctcactgcaggctccgcctcccgggttcacgccattctcctgcctcagcctcccgagtagctgggactacaggcatccaccaccacgcctggctaattttttgtgttttttcttttttttttttttttagtagagatggggtttcaccgttttagccgggatggtctcgatctcctgaccttgtgatccgcccgcctcggcctcccaaagtgctgggattacaggcgtgagccaccgcgcccggccttgtttttattttttaaagaagtgtattcatgtatcatcctaatagtcagtaatcacttgctacacctgttccctgtctgtggtactgcagtcactccactcctgtaacatttacctttggtctcagcagactcaaactctcattgtgaagtataccaccatttctttccttctttctttctttctttctttctttctttctcttttcttttctttcctttcctttcttttcttctttctttctttctttcttttttactttctttctttctttctttctttttcttttctttctttctttctttctttctttctttctttctttctttctttctttctttctttctttctttctttctttctttctttcttctttctttctttctttccttctttttctttttttgagacagagtcttgctctgttgcccaggctggagtgcagtggtacggtctcagctcactgcaacctccactttctgggttcaagtgattctcctgcctcagccttctgagtagctgggattataggtgcctgccatcacgcccagctaattttttgtatttttagtagagacagggtttcaccatgttggccaggctggtttcgaactcctgactttatgatctgcccgccttggcctccaaagtgctgggattacaggcatgagccaccgcgcctgaccaaagtataccaccatttctttcagcagtttatgttgtgggaagctaaatccagcatctggtaatatcctagaagccagaaataaagatgtatgtgccaatatatttcttgtcttttaaaaacaaaatgaggagctggcaatttacttccaaaggcactgtgttttattggggaacaggaagagctgtgttgggtaactgtaacagaaatgtttttcattctatgtgactctttgcattgtactcacctggggcgttgtacacatataacttattgataaattatccactaatatattttggttagtatgtctttgttatatttatatgtttatgaagaaattagaatctggtattttgctatgctgtgttgcttacgtagtttttataactttagaggttttgtttgtgacgtatatatatctgagtctagtaagtgaagtaatttgttgttttaattttattttagttgtgtgttctcattttgctgaagacttttggccagagcaagacataaaagattctttccaaaaagtgacactgaggagatatgataaacgtggacatgagaacttacaattaagaaaaggctataaaactgtaggtgattgtaagctatacaaaggaggttataatggacttaaccaatgtttgacacttacccagagcaaaatgtatcactgtgatatatatgtaaaagtcttttatgcattttcaaatgcagatagatacaagacaagacatactggaaagaaacctttccagtgtaaaaaatgtggcaaatcattttgcatgctttcacaactaactcaacataagaaaattcatattagagagaatacctacagatgtaaagaatttggcaatgcctttaatcagtcctcagcccttactaaccataagagaatttatgttggtgagaaacactacagatgtgaagaatgtggcaaagcatttaaccactactcaacccttactaaccataagagaattcatactggagagaaaccctacaaatgtaaagaatgtggcaaagcctttagcaggtactcaacccttactacccataagagaattcattctggagagaagccctacaaatgtgatgaatgtggcaaaacctttagcatatcctcaacctttactaaacataagataattcatactgaagagaaaccctacaaatgtaaagaatgtggcaaagcctttaaccggtcctcaacccttactagccataagagaatacatactggtgagaaaccctacaaatgtgaagaatgtggcaaagcctttaactggtcttcaactcttactaaacataaggtaattcatactggagagaagccctacaaatgtgaagaatgtggcaaagcttttaaccagtcttcaagacttactcgacataaaaaaattcatactggagaggaaccctacaaatttgaaaaatgtggcagagtttttacctgttcctcaacacttactcaagacaagaaaattcatactggagagaaaccctacaattgtgaagaatgtggcaaagtttttacctattcctctacacttactagacataagagaattcatactgaagagaaaccctataaatgtaacgaatgtggcaaagcttttaaccggtcctcacaccttactagccataggagaattcatactggagagaaaccctacaaatgtgaagaatgtggcaaagcctttaagcagtcctcaaaccttaacagtcataaaaaaattcatagtggagagaaaccctacaaatgtgaagaatgtggcaaagcttttatcctgtcctcaagacttactcaacataagaaaattcatactggagagaaaccttacaaatgtgaagaatgtggcaaagcttttaaccggtcctcaagacttactcaacataagaaaattcatactggagagaaaccctacaaatgtaaacaatgtgacaaagcttttacccactcctcaaaccttagtagtcataagaaaattcatagtggagagaaaccctacaaatgtgaagaatgtggcaaagcttttaatcggtcctcaagacttactcaacataagaaaattcatactagagagaaaccttacaaatgtgaagaatgtgccaaagcttttacccggtcttcaagacttactcaacataagaaaattcataggatgggtgtggtggctcatgcctgtaatcccagcactttgggaggcagaggtgggcggatcacgaggtcaggagatcgagaccgtcctggctaacatggtgaaaccccgtctctactaaaaatacaaaaaaaaaaaaaaaaaaaattagccaggcgtggtggtgggcacttgtagtcccacctactcgggaggctgaggcaggagaatggcctgaacccggaggtggagcttgcattgagccaagatcacaccactgcactccagcctgggtgacagagccagactccatctcaaaaaaaaaaaaaaaaaaaaaagaaaagaaaattcataggccaggtatggtggctcatgcctgcctgtaatcccagcactttgggaggccgaggcgggtggatcacgaggtcaggagttcaagaccagcctggtcaacatggtaaaaccccatctctactaaaaatacaaaaattagctggatgtggtggcacatgcctgtagtcctagctacttgggaggctgaggcaggagaattgcttgaacctgggagccagaggtagcagtgagctgagatcacgccactacactccagcctggatgacaaaacaagactctgtctaaaaaatatataaataaataaaagaaagaaaattcatagtagagagaaaccttacaaatgtgtagaatgtggcaaaactcgttttaactaatgctcacatcttattgcatagaaaagcatttatacctgaaaaaaggtatacaaatttaaaaaatgtggaaaagccattaaaatctgttcacatcttaacaacagagagttgatacttaataagagcattgtaagtgcaattactgtcaaacaatcttgtagaaaatatcatcctttaaagtgaatgagactagtctgaggaaaaacattacaaatgtaaagagggttatagtgcatttacttgtatcacagatcttgttgtacacattttatactagaggaaaaccctgaagcagttgcaccaactttgttcaacatcagaaatttatattggagaaaaatccagcaagtgtaataaatttggaaaaacttttttttccccaaaaactatacctcaggaaacaatggagagtttatattaacatatatttttgcatatggccatatgtataaaaatatttaattcaaaattgaatttaaaaagtctacataaatatcatacatagatatgtatgatattgaatacatgtattaaatacatagaatatgatatttaatacatagaaaagtctacatgaatatcagaatttacagtagaaacaactaagacacaaacacttgagacattacactaaagtgctgagtatagaaaataaaactaaagttgttaaattatttgtatataacttttaaaagagtggaagatattttgcaaagttatattcaaagtgtactttttatttatttttttgagatggagtctcactttgttgcctacgttggagttcagtggcacaatttcagcttgctgccaacttcgacctttgggttcaagcagttctcctgccacagcctcctgagtagctgggaatacaggcatacaccagcatgtctggctatttttttttttttttgtatttttagtagagatgagatttcaccattttgtccagggtggtctcaaactcttcatctcaagtgatctgcccaccttggcctcccagagtgctgggattgcagccatgagccactgcacccagcccaaagtatgcttttaaaaatatgtatatatataaaatttttgaaaagcaaattatgatataattcaagtatcaaattacttcatgctgtttcattgttcctattcacatgtgaaagcatgtgatcaattattgctgcatcacatatagactcattaggtggaaattatggcctcttctgtaaaaaagtaaggacattaaaatgtaagatgcttgatgaaaatctaagtggagaggctctttgtggttaacttattgagtgatgtatgaggtcgatgttcagagtaatatgcctctgtattacagtgatagaaaatattttttagttaaaagtgaatttataataaaattgtaaatcattttagtgattgagcttttatgttataaaatgcagtatatttcaaaatttttaaattatatgtaaatttgattttatttgttaccatgttaagactattgtgcatttaatgaagcattattatgctatcaactttaacctatcccacgttactcaagggtgtagctaaatgaaggtagcagtatgctatttagtaacatagtggaatagcatctctagtaatctcttttgccagtagctttaactggcagataagttaatattgttcccataggttaaatatttatcctttttttgatatttaaatttttttcttatttttttgtgggtacataatatgtgtatatatttatgcaaatctggcatattttgatagaggcatacaatatgtaataattacatcaattacatcagggtaaattatgtagccattacttgtaacatttatcttttacaaacaactcaattatgcacttttagttattttaaagtgtacaattaaattgctattgactgcatggttatctttgtggtataaaaatttatatataagtataaataaactcatttctgagtcttaaatagatattttcaattatttgtaatatatttttatttgaacatttggcctctctgcctgcaaacacacacagacttttagctttgatttacatagagttaaatgtacacatgtgtggctgtaaagataaatcttagatgtaagaaaattatacagttattaagtgtctttgtgtgaatacacctaatttttttgaagagtaatattggaacaaaaagaatcattttattaaggttgctaatatactagaaaacaaaaaacctcaaaaatgctgaaagcaaatctatactctctttttattgaatttattactgtaaaattttatggctatagttcagaatctccccatgcaaattctctgtatttatttgcctggtactcatgctaggcccttaatttttttgtgtgttttatatattttttgttgtatagtttatgaagtattcattatgtgagctggtcagagattataataaattttataaaattgagtaatgcacacaagataatttttagatataattttaaaatagtgtatttacattttatttagttagggcattccattttattaactggagaaccctatataagcattttttaaaaattattgcttcttttcacttttataagtgacaagtaaatttattaattgagtcaatttgttcaggtaagtactagggagacttcataagtcatgaggatgtttttatatataaatgtagcaaacaaatatgaaagttcctcctgtgtcacagacgctccataataagccataaatattcctgctggagttagtttgtattttcaagtcagagatgaaaaatatccatggtgaagaaatcttcatgtggcgaaggcatttttgtccaggctgcaaagctgactcttaatgaatttaaagagaaattttgcttctcttgtttcttatcctgttttgtttgtcttatgtgtattccaaggttgtatgcattacaatgaactacagtacttcttttactgtgttatggcaacagttttctcactgttgtcttcatttcacatggtactttgaaggttctaatgagaaagttttgttttgttttgttttgtttgagatggagtttcgctcttgttgcccaggctggagtgcagtggcacgatctctgctcactacaacttccccctaccgggttcaagcgattctcctgcctcagcttcctcagtagttgggattacaggtatgcaccaccacgcctggctaattttgtatttttagtagagacggggtttctccatgttggtctggctagtctcaaactcccgacctcatgtgattcgcgcaaagtgacttggcctcccaaagtgttgggattgcaggagtgagccaccacacctggctgaaagtttattttttaatgcactgaaaaagtggttttaactggggaatttgcttatcaatataacttttggattgataaaataagaggcacacgtttttcctgggtgagagaattacatcacttagcattgtttgtctgtaaaagaaaaatctttatgtattttatttttttgagatggagtcttgctcttgtcacccaggctggagtgcagtgatgcagtcttgactcactgcaacctctgcctcctatgttgccgcaatctcctgaatagctgggattacaagcacccgcaaccacgcctggttaatttctgtattttagtagagatggggtttcagcctgttggccaggctggtctagaactcctgacctcagatgatctgcccgcctcagcctcccaaagtgctgggattgcaggattgagtcactgtgcctggctggaaaaatctattagattcttacacaaagtgtggtaaatatcaattttgttagaaactcattttgtattccatttttttgtttgtttgtttctttgtttttgtttttttgagatgaagtcttgctctgttgcccaggctggagtgcactggcaatatcttggctcactgcaaccttcacctcctgggttcaagtgcttctcctgtttcagcctcccaagtagctgggattatgggcctgcgccatcacatccacctaatttttgtatttttagtagagatggggtttcaccatgttggccaggccgatcttgaactcctgaccccaagtgatccacccaccttgtcttctgaaagtgctaggattacatgcgtgagctaccatacctggccaggaaccatctttgaagttatatttttttttttccccttttgagatggagtctcgctgtattgccgaggctggagttcagtggcatgatcttggctcactgcatcctccacctccccagttcaacaattctcctgcctcagcctcctgagtagctgggattacaggtgctcaccaccacacccagctaatttttgtattttttgtagagatgggtttcactatgttggtcaggctggtctcgagctcctgaccttgacgtgcactctttgtggacaccaggacacaaactctctgtggagtcagcaagcaaaacgacagcggaacacaacagcagaagacccagagacagaacatgcatacagggtgtgaggaggggagctcaggtcaaacttcacattgtccagagagacagcaaattagaggaggaggaaggtgatcagcaggagagacatctgcagggaaaaaaatgtaacccagagataatttaaagttttttaaacaaatgaaaaatattttagggcaagtgtaagttaagaggaggtatttcagcaagacttagcattagacataaaatcaaactaatatggactgcaataattgttaaagaaatttgtattaactagttgataaaatcaatgtatactgcttggatctgcagtgaacgatagttaaccactttgcagcgtttactgactacagttttaggtaaaaattacgctattagtattccaaattactagagggatggggaagggaagttgacagaaaagtggttctcaagtgtatgttagtattgaagggtaatttgtagagcttatatggtttaggttcaaatggagaaagaatgatttaaaaactgagagggggagaagaactaggctgtataaaaaactgcggccaggcacggtggctcaggcctcccagcactttgggaggccgaggtgggtggatcacctgaagtcaggagtccaagaccagcctggtcagcatggtgaaaccccgtctctactaaaaatacaaaaattagctgggtgtggtggcgcatgcctgtaatcccagctacttgggaggctgaggcaggtgaattgtttgaacctgggaggaggaggttgcagtgagctgagatcactccattgccctccaaactgggcgacgagcaaaacttctctgaatgaatgaatgaatgagcaaattgagatcccctgaagcagcagatgctgtgaaactggatgttctagtaccaaacataacaaaggactaataaagaggggaacaaatttaaaatagtttatgtgtcgactagtttatgtatctaaaaagtaaaaattaggccaggcgcaatgcctcatgtctataatcccagcactttgggaggccgaggtgggagtatcacctgagattgggatttcaagagcagcctgacagagaaaccccgtctttactaaaaatacaaaaattagctgggtgtagtggctcatgcctgtaatgccagtcactcgggaggctgaggcaggagaatcgcttgaacccgggaggcagaggttgtggtgagtggagatcatgccattgcactccagcctgagcaacaagagtgaaactccatctcaaaaaaaaagataaaaattaggagtcgatttcaccatatagtttaaaacaaattcatagtttttttttgtttgtttgtttttttgagactctcactgtcacccagactggagtgcagtggtgcaaccttggctcaatgcagccttcatctcctgggttcaagtgattctcctacctcagctttctgagtagctgggattacaggcatgcgctaccacacccagcttatttgtgtatatttagtagagatggagtttcaccatgttggccagacatgtctcaaactcctgacctcaagtgacctgcccgccttggcctcccaaagtgctgggattacaggcatgagccactgtgcccagcaagaattttgtaatgcatttatcctgaatatacctgcttagcaaaataccataattttctacatacatttctaaatacatttaggcttattttctacaaatattattctggacatcttataaatgctaggaacactctggaagaatgaatgtattgagttttacagtatttcaggtatctacctagagtattaaatatttcttgttttttgtttttttgttgtttttttgagatggagtctcactctgtcgcccaggctggagtgcagtggcgcaatctcggctcactgcaagctccgcctctcaggttcacgccattctcctgcctcagcctcccgactagctgggactacaagcgcctgccaccgtgcccggctaatttttttgtattttttttttagtagagacggggtttcacggtggtctccatctcctgacctcctgatccgcccacctcggcctcccaaagtgctgggattacaggcgtgagccaacatgcccggcaaatatttcttaatcaaaatccaatctctaaggaatctatttagaaattttagtagattctaataaaaatgttttcctggaatattttgtgaggcgcattatgcagatcctggaaatattaagcgaattaaagcctctaagcctttttttttttttttttttttgagatggagtctagctctgttgcccaggctggagtgcagtggtgcaatcttggctcactgcaacctctgcctccagggttcaagcaattctcctgcctcagcctcccgagtagctgtgactacaggtgtgagctaccatgcctggctattttttggatttttagtagaaatgggtttcaccatgtttgccaggctggttttgaactcctgacctaaagtgatctgcccacctccacctcccaaagtgctgggattacaggcatgagccaccacgctcagcctccaagcctaaatttttttattttcctgaatgcaatttaaggaattttatttcctgaatgcaatttaaggaattttaaattgaccatttgtcaatttaaaagggtactaaggctataagaactcagtcatatggacgcacacacagacacacagaaaatattaatcaggtaagttgtgacatcaagtaggcaaaaacccaaattatttctgaaaagtttcctagttcgttttaatatttcaatattcttctgaatattctactttttgccatttttttttgcttccctctttgctatataaatggaaggcaacacacatcctattgttgagctcttcaaagaagccttggatagagaatatgaagactattccagatttttctttgagtgtagacatctttgacagttttcaaattaaagaagtatacaggacaggtgcggtggttcacatttgttatcttaacactttgggaggctgagtcgggtggatcacctgcggtcaggagtttgagaccagctggaccaacagagtgaaaccacagctctactaaaaatataaaaattagccaggcatggtggcatgcgcctgtagtcccagctacttgagaggctgaggcaggagaactgcttaaacccgggaggtggaggttgcagtgagccaagatagcaccactgcactgcagcctgggagacagagtgagactctgtctcaaaaaaaaaaacaaaacaaaaaaactacaactagaaatactctattatgtaggatacatggtactgtctttataacaattatctttgcttcagtttttttaaattacttttattactaagtttggaaattttgtttacttaagttattgtcagcacaggctaatttcaaactgtaatattggaattaacagagttttgtaaggatttttgtttctgcaaaatgtcctcaatgtatgcacaagtttttatatcctagaaacaatgttaattaggggacttttgtgtaaaattggtcttcaacggggttcaaatcgtggtgtatatacatatataaatatatatatatataaatatatagatgattttattttttatgtttttaaatttaaattttttaatttctgtgatacatgtgcaaaacatgtaggtttgttacatatgtatacatgtgccatggtggtttgctgcacctatcaacacatcatctaggttttaagccccacatgaattaggtatttgtcctaatgctctccctcccattgccccccacaccctgacaggccccagtatgtgatgttccccttcctgtctccatgtgttctcgtcgttcagttcccacttatgagtgagaaaatgtggtgtttgattttctgttcctgtgttagtttgctgagaattatggcttccaatttcatccatgcccctgcaaaggacatgaactcattcttttttatggctgcatagtattctgtggtgtatatgtgccacattttcttatccagtctatcattgatggacatttgggttggttccaagtctttgctactgtaaagagttctgcaataaacatgtgtgcatgtgtgtttatagtataatgatttataatcctttgggtacatacccagtaatgggattgcttggtcgaatggtatttctggttctagattcttaaggattgccacattgtcttccacaatggttgaactaatttacagtcctaccaacagtgtaaaagcatttctccacagcctcacgagcatctgttgtttcctgactttttaataattgccattctaactggcatgagatagtatctcattgtggtttgatttgcatttctctaacgactagtgatgatgaactttttttcatacgttttttggccacataaatgtcttttgagaaatgtctctttatatcctttgcccactttttgatggggttgtttttttcttataaatttttttaagttccttgtatattctggatattagacctttgtcagatgagtatcttgcaaaatttttctcccattctgtaggttgcctgttcaccctggtgatagtttcttttgctgtgcagaagctctttagtttgattagatcccatttgtcaattttggcatttgttgcagttgcttttgtgttttagtaatgaagtctttgcccatacctatatcctgaatggtactacctagattttcttctagtgtttttgtggtttggggttttacatttaagtctttaatttttcttgagtatatttttgtataagttataaggaaggggtacagtttctgttttctgcatatggctagccagctttcccagcaccatttattaaaaagggaatcctttccccattgcttgtttttgtcaagtttgtggcagataagatggttatagatgtgtggtgttatttctgaggtctctgttctgttccattggtctatatatctgttttggtaacagtaccatgctgttttggttactgtatccttgtagtatagtttgaagtcaggtgacgtgatgactccagctttgttctttctgcataaaattgtcttgactatacagattctttttttggttccatatgaaatttaaagtagtttttttctaattctgtgaagaaagtcaatggtagcttgatgggaatagcattgagtcataaattactttgggcagtatggccattttcatgatattgattattcctatccatgagcatggaattttttcccatttgtttgtgtcctctcttatttccatgagcagtgttttgtagttcttcttgaagaggtccttcacatcccttgtaagttgtattcctaggtattttattctctttgtagcaattgtgaataggagttcactcatgatttggccctctgcttgtgtattgctggtgtatagaaatgcttgtgatttttttttttttttttttttttttgagacagagtctcactctgttacccaggctgtagtgcagtggcatgatcttggctcactgcaacctctgcctcctgggttaaagcgattctgttgcctcagcctcccgagtaggtggacctcagatgatccacctgcctcagccttccaaagtgctgggattacaggcatgagccaccatgaccagccaaatgcttgtgatttttacacattgattttgtatcctgagattttcctgaagttacttatcagctcaaggagcttttgggtggagacgatggggttttctaaatatacaatcatgtcatctgcaaacagagacaagtttacttcctctcttcctatttgaataccccttatttatttctcttgcctgattgccctggccaaaacttccaatactatgttgaataagagtggaggagccaggtgcagtggctcactcatgtaatcccagcatttggggaggccaaggcgggtggatcacctgagattgagagtgcaagaccagcctgaccaacatggagaaactctgtctctactaaaaatacaaaattatccaggcatgttgtcatacgcctgtaatcccagctactccggaggctgaggcaggagaatcacttgcacccaggaggcagaggttgtggtgagccgagatcatgccattgcactctagcctgggaaacgagtgaaactccgtctcaaaaaacaaaagagttgtgggagatggcatccttgtcttgtgccagttttcaaagtgaatgcttccaccttttgtccattcagtatgatattggctatggatttgtcataaatagctctattattttgagatatgttccatcaatacctagtttattgagagtttttagcatgaaggggtgttgaattttatcaacagtcttttctgcatctattgagataatcatgtgttttttgtcattggttctgtttatgtggtggattattttattgatttgcatatgttgaaccagccttgcatcccaaggatgaagccgacttggtcgtggtggataagctttttgatgcgctgctggaattggtttgccagtattttattgaggattttcacttcaatattattcagggatattggcctgaaattttctttttctgttgtgtctctgccaggttttggaatcaggatgatgctggcctcataaaatgagttaggaaggagtccctcttcttccattgtttggaatagtttcagaaggaatgataccagctcctctttgtatctctgatagaatttggctgtgaatccatgtggtcctgggctttttttggttggtaggctattaattactgcctcaatttcagaacttgttattggtctattcagggatttgacttcttcctggtttagtcttgggagggtgtgtgtatgtgtccaggaatttatccatttttttctaaattttctagtttatttgcaaagaggtgtttatagtattctctgttggtagtttgtatttctgtcagatcagtggtgatatcctatttatcatttttattgtgtctatttgattcttctctcttttctttattagtctagctggcagtctatgtattttgtctatgttttcaaaaaacagctcctggattcattgattttttgaagggttttttgtgtctctatctccttcagttctactctaatcttagttatttcttgtgttctgctagcttttgaatttgtttgttcttgcttctatagttcttttaattgtgatgttagggtgttgattttagatcctttcagctttctgatgtgggcatttggtgcaataattttccgcttaacactgctttagctgtgttccagagattctggtactttgtctctttgttctcattgctttcaaggaacttctttatttctgccttaattttttctttttctttttttttttttttattgatcattcttgggtgtttctcacagagggagatttggcagggtcataggacaatagtggagggaaggtcagcagataaacaagtgaacaaaggtctctggttttcctaggcagaggaccctgcggccttccgcagtgtttgtgtccctgggtacttgagattagggagtggtgatgactcttaacgagcatgctgccttcaagcatctgtttaacaaagcacatcttgcaccgcccttaatccatttaaccttgagtggacacagcacatgtttcagagagcacagggttggcggtaaggtcatagatcaacaggatcccaaggcagaagaatttttcttagtacagaacaaaatgaaaagtcttccatgtctatttctttctacacagacacaacaaccatccgatttctcaatcttttccccacctttcccccttttctattccacaaaaccgccattgtcatcatgacccgttctcaatgagctgttgggtacacatcccagatggggtggtggccgggcagaggggctcctcacttcccagaaggggcgaccgggcagaggcgccccccacctcccggacggggtggctggccgggcgggggctgaccccccacctccctcccggacggggcggctggctgggcgggggctggccccccacctccctcccggaaggggtggctggccgggcgggggctggccccccacctccctcccggatggggcggctggccgggcgggggctgacccccacctccctcccggatggggtggctgccaggcagagacgctcctcacttcccagacggggtggctgccgggcggaggggctcctcacttctcagacggggcggctgctgggcggaggggctcctcacttctcagacggggcggccaggcagagacgctcctcacctcccagacggggtcgtggccgggcagaggcgctcctcacatcccagatggggcggcggggcagaggcgctccccacatctcagacgatgggcggccgggcagagacgctcctcacttcctagatgggatggcagccgggaagaggcgttcctcacttcccaggctgggcagccaggcagaggggctcctcacatcccagacgatgggtggccaggaagagacgctcctcacttcccagaaggggtggcggccgggcagaggctgcaatctcggcactttgggaggccaaggcaggcagctgggaggtggaggttgtagcgagccgagatcatgccactgcactccagcctgggcaccattgagcactgagtgaacgagactccgtctgcaatcccggcacctcggggggctgaggctggtggatcactcgcggttaggagctggagaccagcccagccaacacagcgaaaccccgtatccaccaaaaaaaatacgaaaaccagtcaggcacggcggcgtgcgcctgcaatcgcaggcactcgtatttctgccttaattttattatttacccagtagtcattcagcagcagattgttcaatttccatgtagttgtgcagtttggagtgaatttcttaatcctgagttctaatttgattgcactgtcatctgatagactgtttgttatgatttcagttcttttgcatttgctgaggagtgttttacttccaattatgtggttgatttcagaataagtgctatgtggcactgagaagaatgtatattctgttgatttggggtggagagttctggagatgtctattaggttcgtttggtccagagctgagttgaagtcctgaatatccttgctaattttcggtcttgttatctgtctaatattgacactggggtgttaaagtctcccactattattgtgtgggcatctaagtttctttgtaagttactaagaacttgttttatcaatctgggggctcctgtattggctgcatatatattaaggatagttagctcttcttgttgcattgatccctttaccattatgtaatgcccttctttgtcttttttgatctttgttggtttaaagtctgttttatcagagactaggactgcaatccctgcttttttttttttctttccgtttgcttggtaagtaaatattcctccatccctttattttgagcctatgtgtctctctgcatgtgagataggtctcctgcatacagcacagtcttgaccctttatccaatttgccagtctgtgtcttttaattggggcatttagcctatttacatataaaattaatattgttatgcgtgaatttgatcctgtcatcatgatgctaactggttatattgcacattagttgatgcagtttcttcatagtgtcattggactttatagttcgatgtgtttttgcagtggctggtactggtttttcctttccatatttagtgcttccttcaggacctcttctaagggaggcctggtggtgacaaaatccctcagcatttgctcgtctgtaaaggattttctttctcctttgcatacgaagcttagtttggctggatatgaaattctgggttgaaaattcttttgcttttttttttttttttttttttgagatggagtctcgctctgttgcccaggctggagtgcagtggcatgatcttggctcactgcaacccctgcctgtcaggttcaagtgattatcctgcctcagcctccagaataggtgggattataggtgcctgccaccatgcctggctgatttttgtatttttagtagagataggatttcaccatgttggccaggttggtcttgaactcccaatctcaggtgatccaccctccttggcctcccaaagtgctgggattacaggcgtgagcccaaaaaccgggcgtggtggcgtgcacctgtaatttcagctactcgtgaagctgaggcaggagaatcgcttgaacccaggagttggaggttatggtgagccaagatcgtgccattgcaccccagcctgagcaataatcaaaactctgtctcaaacaaacaaaaaagaatattgaatattggctcctactctcttctgtcttttagtgtttctacagagtgttctgctgttagtctgatagacttccctttgtaggtaacctggcctttctctctggctgcccttaacattttttccttcatttcaaccttggagaatctgatgattttgtgtcttggggttgctcttctcgaggagtgtcttagtggtgttctttttatttcctgaatttgaacgttggcttgtctttctaggttggggaacttctggataatatccacatcactttcaggtacaccaatcaatcataggtttggtttttttacatactcccatctttcttggaggctttgttcattcctttttgttattttttctctaatgttgtcttcacgacttattctattgagttaatctccagtctcatatcctttctttcgcgtgattgatttggctattgatacttgtgtatgcttcgcagagttctcatgctgtgtttttcagctccatcaggtcatttatgttcctgtctaaactgattattctagttagcaattcctctaaccttttgtcaaggttcttagcttccttgcattgagttagagcatgctcctttagctcagaggagtttgttattacccaccttttgaagcctacttctgtcaattcgtcaatctcattctccgtccagtttttgtttgtttgtttttttgagacagagtctcgctctgtcgcccaggctggattgcagtggtgcagtcttggcttactgcatcctctgccacctgggttcaagcaattctcctgcctcagcctcccaattaactgggattacaggcacctgccaccatacccagctaatttttgtattttagtagagacagggttttaccatcttggtcaggctggtcttgaactcctgacctcaagtgatccacctgcctcagccttggcctcccaaagttctgggattacaggcttaagccactgcacccagcctgctccatccagttttgtgcccttgctggagaggggttgtgatcatttgaaggagaagaggcattctcattttttgaattttcagtgtttttgcactggtttttactcatcttcatggacttatctacctttgatctttgaggctgatgacattggatggggtttttgtgtggtggtcctttatgttgatgttgatgttgttgctttctgtttgttagtttttcttctaacaggcctctcttccgcaggtctgttgcagcttgctagaggtccactccagaccctgttcacctgggaatcacaaatagaggctgtagaatggcaaaaattgcttcctgctccttcctctggaagcttcatcacagaggggcaccagcctgatgccaaccggagctctcctgtatgaggtttctatcgacccctgttgggaagtctctcccagtcaggaggcacaggggtcagggaccaacgtgaggaggcagtctgtcccttagcagagctgacgtgctgtgctgggagaatccctcttgtcagggtcacctgctctcttcagagccagcagtcaggaaggattaaatctatggaagctgtgcccacagcaaccccttcccccaggtgctctgtcccagggagatggggattttgtctgtaagcccctgactggggctgtctcctttccatccgagatgccctgcccagcgaggaggaatctagagaagcagtctggccatattttggcagcccacaaatcctcccagcctccttagcactagaaaactgcctactaaagcctcagtaatgggggatgcccctccccccaccaagctcgatcatcccaactcaacttcagactgctgtgctgtcagtgagaatttcaagccagtggttcttagcttgctgagcttcatgggattgggacctgctgagcgagaccacgtggctccctggcttcagcccctttctaggggagtaaagggttctgtcttgctggggttccagatgccactgtggtacaaaacaaacaaacaacaacaacaaagcaaaactcctgcagctagcttggtgtctgcccaaatagccacccagttttgtgcttgaaacccagggctgtgctggtgtaggcacaccagggaatcccctgatctgcagattgcaaaaatcatggggaaaggatagtaacctggccgggtagcacagttcctcacggcttcccttggctgggggagggaggtcccccagctccttgcacttcgtgggtgaagcgatgccccaccctgcttctgctcgccctccatgggttgtacccactgcctaaccagtcccagttggatgaactgggtacctcagttggaaatgcagaaatcacctgtcttctgcatgggtctcgctgggagctgcagactggaaatgtttatttggccctcttgaccctgtcccccaaatcatcttttatttttatttcatccaaatagctgctatcttttttttgtacatctttgcctaaattataataagaacaacgatctaaatttgcatagcaagtggaccctatatttggaatttaaagagtttctggcaaaatttagattaaattggctaattaataacacttttcaaattgctttcccctgctccaataatgaagtataacttctagaaacagctgaaaaatgaattgttcttcgggttatatgctcttaatgttacattgaaacagagtatgaaggcttgaaaatatccgaagggagaaaatggaatcagcagtgatcctgctgtgacctcactacttagtagttatgcttttagccaattcgtttacttgtctttaaactgcacatttctggcagggcagcactaatcactgatcaaaactacctttttttttttttttttttgaggtgtagtctcgctgtgtcacccaggctggagtgcagtggcatgatctcagctcactgcaacctctgcctcccgggttcaagggatcctcttgcatcagcctcccaagtagctgggattaaaagcgtctgccaccacacccaagtactttttatatttttagtagagacggggtttcaccatgttgaccaggctggtcttgaactcctgatctcaagtgatccacctgcctcagcctcccaaattgctgggattacatgcatgagccaccatgcctggccaaatctacctttaaaaattgtgcaggagggaaaggctttaccaacagtgattagttcaaaaaacttcaactctaggcctggcgcggtagctcatgcctgtaatcccagcactttgggaggcctaggcgggtggatcatgaggtcaggagattgagaccatcctggctaacatgatgaaaccccgtctctacaaaaatgcaaaaaattagccgggcatggtggcgggagcctgtagtcccagctactcgggaggctgaggcaggagaatcacttgaacttaggaggtagaagttgcagtgagccaagatcacacaactgcactccagcctggtgacagagtgagaccccatctcaaacaaacaaacaaacaaattaaaaacaaacaaacaaacaaaaaacttcaactctacctcctggctggaactcatattgtagattgcaaaagcacagaattaacatcataatactattgaattcaaaaagaaatctagaaacttcagggaatccagagaagatagagcagatggtctgaatagtcaccattcacattttgctttgttttggtaactattactatcacttaattacatagggtgaatataagaaaattgcctttttcttattttcagtgctaaccctaaaatggtaaaactcttgcaggttgaaattaacagcttctcagtggcccttcaacagaaggttaaagggtagcgaagttgcctctgtaatttccagggtgaacaaatctgaactcagttcttgcagttcccaaattcacagctatcttgggatatgttgatttgtgggctgcaaaatatgagaaattctacctcagagaattctgtttataaaaacttattcgcatctaataatctgaagagatataaacacagcaatgttgttacaactacctgttaattgttaatccttggaaaaagaattgataattatttctgaagacatgaaaagcttcatataataaacaatagactctcaaatgtaaatcagtttttatttttaatttggagaagttaataataataaattgccagcaataaaaaataaatcattcatcaccgttaccgtgttactaatggctggtccatataggtttgcagtgattttggttcttccattctcaaaagaaataatccagcccagagacgaagagtgggtttgaagcataagtggggggttgttgaaaggaaataaagtacccttgggaaagaaccaagggtgtgacttgagagatcaagtgccagagaaaggtcatataccagttaaactccaatatttggcctctcagtgtgcatgcttgggtgtcttgcccaatatttgagattttatgaaacagctgctgcccctgagctcaggatgtgttctgtgtttaggaggtttccccctccctggtaccagctgagaccatttgtcaatcctgagctgaccacctgataatcacctgacattcctggggcacattcccagggtctctaccttaccccactcattactatctgactacctgctctaactgggtgatcaagaatattcttttttctttttttctttttttaagatgcagtttcacttttgttgcctaggccagagcgcaatggtgcgatctcagctcatcacaacctccgcctccccagtccaagtgattctcctgcctcagcctcccaagtagtgggattacaggcatgcatcaccacacctggctatatttttgtatttttagtagagaaggggtttctccatgttggtcaggctggtcttgaactcccgactttaggtgatttgccccaggtgattcgactgccttggcctcccaaagtgctgggatacaggcataagccactgcacctaccctagatattctactggccttggagctttcggtgtctaaaacttttaccaatcaatatatgcagtccatcaactttcttaacttttattgttagtatgaacttgattttttttgttgatacactagttaagattttattttatacttaaaaatttatttattagtggtttagacaactcctctttctgacaactccatctaacttctaggtataaggcttcctgaggatatattgtaagtttggctttgaatattccacactgagaaattttgaaagcattctaattaaaagaattaaattcaggctgggcatggtggttcacacctgtaatcctagcaatttggaaggctgaggcgggtggatcacttgaggccaggagtgcaagaccaggctggccaacatgatgaaaccccatctctactaaaaatacaaaaattagccaggcatggtggtgcatgcctgtaatcccagctactcagggggctgaggagaatcacttgaacccaggaagcagaggttgcagtgagccgagatcatgccactggactccagcctgggtgacagagtgagactccatctcaaaaaaaaaaaaaaaaagaatttaattcaatctcagctccctgcagcctctgcctcctgtgttccagcgattatcctgcctcagtctcccaagtagttgggattacaggtgctggcaatcacacctggctaatttttgtatttttagtagagacggagttttaccatgttggccaggcttgtctcaaactcctgacctcaggtgacccgcccacctctgcctccaaagtgctgggattacaggcataagccaccatgccctgccagggagttcttatcttgataaaggattacatgagccctctaaaagatgtttgtttaaacattataggtggtggcagcagtagtgggcaaaggtgtagtgtgcagcacttgattattttactgctgtttctgctgagcctgtggcagcccagccctgtgtgcagctctctccctgccccatgatgccaccacattccacctgctggcatggagacatgcacctgaggtggaccctaggagcccggcctaagatgggctcctactgctgctgcttgggctgctggcctcaggactgcaggaaacttgggggacaccagggcactgagaacagccacactggcataatcaacaccttcttctggaacatccattgtcccctcctgttgtgaggagacaatgtctactgctcagaagctcttgacccagctgactgaaaagttcgtgtttagcgaatatatttctacagacattgtggagagtgtggtcagaaatttacagatttaatgctattcctatcaaactaccaaaacattctgaacagaactaaaaaacactattttaaaatttacatggaacaaacaaacaaacaaaaccccaaatagccaaccaatcctaagcaaaaagaacaaaactagaggcattacattacctgacttcaaactatattacaaggctatagaaacccaaagcagcatggtactggtacaaaagcagacttacagaccaatgtgatagagagagctcagaaatgccacccatttacaaccatctgatttttgacaaagctgatgagaggaatgtgtgaagaattctctagttaataaatggtgctgggataactagctagcactatgtagaagactgaaaacggaccgcttccttacaccacatacaaaaatcaactcaagataaagacttaaatgtaaaatttaaaattataaaaaaaaaataggccaggtgtggggctaacacatgtaatcccagcactttggaaggtcaaggcaggcggatcacctgaggtcaggagttcgcaaccagcctggccaacatggcgaaactgtgtctatactaaaaatataaaaattagccgggagtggtggtaggcacctgtaatcccagctactcaggaggctgaggctgaagaattgcttgaaccagggaggcagaggttgcagtgtgctgagattgcgccattgcactccagcctgggtgacagagtgagactccatctcaaaaaaaaaaaaaaaaaaattccctggaaggtaacctaaataataccattccagacatagaaactggcagatattttatgaagaagataccaaaagcaattgcaaccaaagcaaaaattgacagatggaaccttattaaactaaagagctttttcacagcaaaagaaactatcaacagagtaaacaggcatcctacagaataaaagaaaatatttgcaatctatgcttctgacaaagatctaatatccagaatccatgaacttaaaaaaacttattaaaaagtaggcaaaggacacaaacagatctttttttttttttttgagatggagtcttgctccgtctcccaggctggagtgcatggtgctatctcagctcactgcaacctccgcctcccgggtgccggttcaagcaattctcctgcctcagcttttggagtagttgggattacagccatgcaccaccatgcccagctaatttttgtatttttagtagagacagggtttcaccatgttggccaggctggtcttgaactcttgacgtcgtgatccacctgcctcggcctcccaaagtgctgggattacaggcgtgagccaccacgtccggcctgaacagatgctttttaaaaaaagacatgtgtgtggctaaaagcatatgaaaaaatgctcatcaccaatcagtagagatatgcaaagaaaaaccacagcaaaatactttctcacaccagtcagaatggctattactcaaaagttaaaaaatgacagatgctggcaaggttgtggagaaaagggaatgcttacacactgctggtgggagtgtaaattagttcaaccatcgtgaaaaccagtgtggtgattcctcacagaattaaagacagaattaccatttgacccagcaacctcataattgggtatatgcccaaagaaatataagttattctgtcatagacatgcatgttcactgtggcactattcacaatagcaaagacatggaatcaacatgctcatcaaaaatggcagactggataaagaaaatatggtatggctgggcaaagtggctcatgcttataattccagaatgtgggaggtcaaaacagatggattgcctaagttcgagtttgagaccaaccaaggcaacatttgttggtctacaaaaaatacagaaagaaaaattagccagtcgtggtggtgtgcacctgtagccccagctacttggagagctgaggtaggaggattgcttgaatgcaagatgttgaggcttcagtgagccaagattgtgcccatcacaggacagtgggcgcccagactccagcctgggtctccccccaaaataaaataaaatatttaaaagaaaatatggtacataaacatcatggaatactgtgtggccataaaaaaagaacaagattatgtcctttgcagcaacatgaacagagctgaagcccattatccttagaaaactaatacagaaagagaaaaccaaacgcatgttcttatttataagttaagagataataacaagaaaacatgaggccaggtgcggtggctcacgcctgtaatcccagcactttgggaggctgagacaggtggatcacgaggtcaggagatcaagagcaacctggctaacacagtgaaaccccgtctctactaaaaaaaaatacaaaaaaaaaaattagctgggcgtggtggcaggcacctattcgggaggctattcaggaggctgaggcaggagaatggcgtgaacccggggggtggagcttgcagtgagccgagatcatcatgccactgcactccagcctgggagacagagtgagactctgtctcaaaaaaaaaaaaaaaagaaaaagaaaaaaaaagaaaaggaaacatggacacaggctgggcacggtggctcacacctgtaatcccagcactttgggaggccaaagtgggcagatcaccagaggtcaggagttcaagaccagcctggccaagatggcaaaacctcatctctactacaaatacaaaaattagccgtgcatggtggtgcatgcctgtaatcccagctacttgagaggctgaggcagaataatcacttgaacccaggaggccaaggttgcagtgagtcgagatggcaccactgcactccagcctgggtgacagagcaagaatctgtcttaaaaaaaaaaaaaagaaaaagaaaaggaaaccatggacacaaagagaggaacagacactgaggcccactttggagtagagagtggaaggataaagatcagaaaaaatacctgttgggtactatgcttagtacttcagtgataaaataatctataccaaatttccatgacagttttatctatataataaacttgcacatgtacccctgaaccaaaaataaacattaaaaagtaaaaactccattagtgggggagagtctaatgtaggcagaagaactggtttgtgctatttctgggtccatgtagactgatgaggttatgaacaggtggcccagaaccctaggtggagaaaacaggtttctgctgcagattcagtgtctgggtgtggggatatgccagacttatagacacttttgtgggtttttggcaagaaacactagaatgaaaaatgccatggtgaagttcctgatggtggtgtctagtccggggaggggtgtggacatgtcaatgtctagtgggtatgtttatgagtgggtgggaatactgtggtggcagctgtgggaaaagggggactgtcatcagagctccttaagttttcatcctctctcactctgggaggagacctagaatcacaggacaatgggcagcgtgacagcctgtgtacaggagagcagagcctcccattcccagacaccgagcgattagtccaagccaggattccatatcttttctctgtcaccaaatgtgtagagttagctgtacaccaagcaattctgcaacaccaactaattgtccaacatttgaattctgaccctacccagagtcagcacagaacctgattccaggcttagtctcaatacattgacctcacagcagatgccaatcacaaaccccttgggcccatctgtgcttgtaagctactgtttaaaaattcagaactcccataagctccctgaagttcaataatttgatagagctactcacagaactcagcatgtttaccagtttattgtaaaagccacaacccaggaaaagtcaaatggaaaaaacatataggaccaaaaaaagagctgggaaaaaatgaagcttatacataatcctagaaaatagctgtgattaataaaattatccatccatcgtgtgctccaggaacagcttatggaaagaaacacccttcccattatgacttagatggtgctgtcttttcttacctatcacatagccagacacagactctgcacattttcttcttgttctcaaaaaaaaggtgccggacacagtggctcacacctgtaatcccagcactttgggaggccaaggcgggtggattacctcaggttgggagtttgagatgagcctggccaacatggagaatccccatctctactaaaaatacaaaattagccaggcgtggtggcgcatgcctgtaatcccagctagtcgggaggctgaggcaggagaattgcttgaacctgggatggggaggttgcagtgagccaagatcacacgatagcatttccagcctgggcaacaggagcaaaactccatcttaaaaaaaaaaaaaagaggaggtgaatttgtcctcagtggtcaaaataaaacacttataaagcaaacttcagttaagtttatctccttcccacagattcctgaactttgagctaccttcactttgagtcaacataaaacttcattttatatccctcctaagaacatgctgacttcagggaaaaacattctctgatctaaaatctgatttttttaccctccacttgccattgccctcccaacttctttctaatcttgtttgctcctccctatgaaagaaagcccttgtctgcctaaactttgcaatccttaaagatcttatagttggtacttcctcctgttgcaatgctcctttgtacactgaattttcttacataaatccaactttatttttaaaagtcaagaaactgcctcaaaacagtaacaagttcatctttggtaatattctcccagtctccttttatcttaaccttactagcatctgcctgtgggtccccagctttccagggctctgtagcttccctcaggattaaggcttcttttatagctgggctgagcaggctgggacttctgcaggggaggctccccagaaagaactaactgggcccttaataacctccttttgcaggctcaacattagttttttcttggagtcactgggctcaggctttaatttccatgtcagagttatacacttgatttttgaaactaagtgtttgaaaaattcagcaaaattactcaaacacagtgttcatacatggaaaataaattataaggtgcttacttttttttttttttttttttgagacagagtctcactttgtcacccaggctgtagtgcaatggcacagtcttggctcaatgcaaactctgcctcctgggttcaagtgattgtcctgcctcctcagcctcctgagtagctgggactacaggtgcatgccaccacacttggctaactttgtattttacgtagagacgggtttcactatgttggccaggctggtctcgaactcctgacctcgtgatctgcccgccttgacctctcaaagtgctgggattacaggcatgagccatcgcacctggcctacattttatacctcaataagaacagcaaaagtatctatttctttcagataataaatttattattgtattatttctattaaaaataatgtagtaaacaattagtcatagggaaaaacttctaggaggtaccaagtttcatctcatgaaatttagtatgaaactcagaaatcaagataacaggatacagaacagagatattcactctcagaaatttaccctgcagaaagaggaactaatgttttataaatttatgtaactcaccaattatctacaatatttcctcgtggaaatgtattcattttctacagccaaaatcgaaggagattttccctattattttccttggtagcattctaaaagctgagccttggaattctgtttgaaatcacctacagaaaacacacctgagaaaattcctaaactctctctgggaaagaaaaaggtaagtaagaatttttaacatacgaaatatatgattagatattaatattttttgaaacccaccacttttatgccctttgtaaatgtttttgaacctttcaagctctactaataaaatgcaatttacagtttaagaaattgaaatcaatataagtgaacaaatcttttcaaggtgacgaacccagggtgtagcagtgatgattaaaaaacagatgtgtctgacttatgtgtcaagtcaggtcatccaatcacgtgagagattctcccaccccagcctgctcacttaactgctcaatgactaacctctcaggagacactgcactatgttccagtgagtggcccaggttttactttcggaaatttttgcagcatctctctggggtcaggttttcttttgttttttttttaggggggatactattttttctttcacaaatcttagagaattcaggggacagaaattatttctgttttccccttaataccagcctctgattggctgaccagcaatgtgtcaccaagatatgaaagctgggttgggtgaaaacaatgttaatgtctcaaggggttacttttttaaaggaagagcacaccaggagatttctctcagccccagtgcatccatctgcttccttgagaggctacactccatacctcaggctgtcctatgaaagaaaatgacccaggacctgagattccctagacactctagcagacatagccatggctgatataatggtttattcacagacagtactgaaaccgatgaccaagaaaaaactaaagggtggttgaggacacatcacccaataaagcttccccccgccaaaaaaaaacctttaccccaaagcattctggtaagatctctgcctagggaaggtaaaaggaaaagaggcacagagattttacacaacacagtgtcaggggttattctttgctttcttctcatgggaaatatttacaaacagaaaatgaatcttttaaaatgtgccatccagtggtttgtaaaaaaaaatacagtattgaaaatatacactaaaggacaaatagatgacaatgtgaactagggaaacgaggctggcatttgggattgtcagaaggaactggaaatttagtattttacttcaagcctgagttaggctggaggaatgggggatgagggctagacttgagaccgcacttgggacacatttaaaaaattcaggggaaaaaaaaaatcagtctcttgtgaagtgtgtatcctcaaacatatattttttttttttgtaaatttttgtaaattgcattggggaaaacaaaatttaagcttaaccaactaactataaatggccaattaagctctgattacataaccagaaaatttacacactcaaagtggaaattaagaaagtacgtgactccctgtagtcccagctgctcgggaggttgaggcaggagaatcgcttgacaccgagaggttgcagtgagctgagatcgcgccactgcacttcagcctgggtgacagagcaaaactgtctcaaaaaaaaaaacaaaaaaaagtaggtaactgtacctaaccgattattgaatttgtttttttttttttaatcatggaccttataaaagtctttccttcaagttcctcccatgaaccacaaactaaaacccatagctgggtactctacaatttttgagccactctttgattaaattctttaatctttttgcggtgactccataaatttttaatagatgaaaagagggactaggaaccccaccgaccaaaactcttcccattcatgaaccctcacccgagtcgggattctcccctgactaccctcccatggtccctgcacaattggccagagacaaggcgctgcggctgcagagctgcccagagaggcctccaggccaggggaccatcactgggtcactgtgcagacaggacgcccagtgtggggaaaagcaagagagatcagattgttactgtgtctgtgtagaaagtagacagacataggagactccattttgttttgtactaagacaaattcttctgccttgagatgctgttaatctataatcttacccccaaccctgtgctctctggaacatgtgctgtgtcaaactcagggttaaatggattaagggttgtgcaagatgtgctttgttaaacagatgcttgaaggcagcacgctccttaagagtcatcaccactccctaatctcaagtactcagggacacaaaaactgcggaaggccgcagggacctctgcctaggaaagccaggtattgtccaaggtttctccccatgtgatagtctgaaatatggcctcgtgggaagggaaagacctgaccgccccccagcccgacacccatgaagggtctgtgctgaggaggattagtataagaggaaggcatgcctcttgcagttgagacaagaggaaggcatctgtctcctccctgtccctgggcaatggaatgtctcggtataaaacctgattgtacgttccatcgactgagataggaaaaaaccaccttagggctggaggtgggacatgtgggcagcaatactgctttgtaaagcattgagatgtttatgtgtatgcacatctaaaagcacagcacttgattctttaccttgtctatgatgcaaagacctttgttcatgtgtttgtctgctgaccctctccccactattgtcttgtgaccctgacacatccccctcttggagaaacacccatgaatgatcaataactactaagggaactcagaggctggtggaatcctccatatgctgaacgctggttccctgggtccccttatttctttctctatactttgtctctgtgtctttctcttttccaagtctctccttccacctaacgagaaacacccacaggtgtggaggggcaacccacaccttcagcccagggtcctgctgtcagcgcagccaccatgctatggctgaagaggactgaggctgagttggccaaggagaactcggggcgcagactgtggagctgactgacgggagacccgagtcccaccacagccacttgccaccagttccaatcaactccttcccttttctcaggatgtcggacccggcactctcaccatttctaggcttccagggggtcctggcatcttagctgtggatctcccaatacctgcaggtcacaaagtcacggagactgggcctctgaagactagacgtagaactccagctgcagccggagacaaaggcccccatattccggaagctgtcttgcccgctccagctgcgtggctgattggagggtttccagcccagtgttgctgattggataacgcttaaatccccgcctcctcacatcgtgattgacagaagatgtgaccaaacgctaggctgaatgaagaaagagtgactgcctaagctgccgcccgctcagaaagggcttcgtccctgagctgagccaggcccaccctagagggtgtttgcatgtaatcttgtgtataaggttatatgcatttataaatattatactgtatggctattcacaaatgaaaagaatataataataatgattttgaaatttcaggttttataaccttcctggctttgagaaggcagcatgagattttttgtctttgtttttgttttttgagacggagtcgctctgttgaccaggctggagtgcagtgacgcgatctcggctgactgaaagctccgcctcccgagttcacgccattctcctgcttcagtcccctaagtagctgggactacaggcgcctgccaccatgcctggctaattttttgtatttttcgtagagacacgtttcaccgtgttagccaggatggctcgatctcctgacctcgtgatacgcccacctcggcctcccaaagtgttgagattacaagcgtgagacactgcatccgtctgttgtaacaatttaattaaagcaatatatccaaaatattattttaatatgtgagcaatgtataattatgaatgagatatatatttatatataacataattatgtatctatatattgcattatgctatgtatttttatccatattatatatagatatttttatctatatgttgtatatttttatatttatggaactaaatctttgaaactaactctgcattttacctttcttgcaaattgcagctcagaccagccacattccaggctcccaggagtcacacatggtcaatacctgtcacattgaagtgcagctctgttgtcaggtctgtgaaaggcctgaatatcccttttcttcctgttaggaataacgctcaaaatcataaggaaattgaacactcgaacaaaggattcctagcaaagcaattttagttctgcacagaggggtgcgttcttgtccagtcaccatgagagcacacctgaacaaaggggcacaagagcctttattcctgacacaagtcctgcccctgtaccctttccccattggccagggtcgggtcgtacaatctgaactaatcctggttggctaaacatttgatttttttagataaggtgggcatgcaaaagaatgcagagaggaaggggaaggggtgtctgcattgagctagaaagttagtcctctttccaaataagggaagaaatgtgagctggtactgataatgcctggtactgtggcgtgcctgggcatctaacaaaggcagaaaggaaaaaggagaaaaaggaaaaaaaggggtgtgtgtgtgggtactatgaattaaagaataaaagattgatcaggctatttgaagagaaacctcatcgtatcccacatgcccgacatgagggaacagcctctttctactaacatctgtcttcagtttcaagggtggaacagatagtggtcatagaaagagcagaaggtaacaagaataaaataaccacaggtagaccactgaagaatgatggggccacaggagaacaaaactctatgtcttcagacctgtccacagtattgacctccaatttttagatatgaagaaaatagattaaaggcaaactttggctatttggccttggccataatggtcaggctctggtcatcggttttttcctgtggtgtgggggactgtgtgcatataagcaccaatcacatgcatacatgtctacaagtattcctgcatcagtcaacattgccttacaagacatttaactttaaatcgggaaaaatgtcagtacctttagggtgcccattgttagaaggtgactaataatcaaactgtctttaaatcttgacacccaatctgcactgggtgcatgtattagttaggtatggcagcataacaaatcatccaaaacttattagctcataattgagatggtccgccatttaggctaggctcagtggggccattcttctgttcccagctgagctccttcagacatgtattgtcagctgtttgttgactaggcagctgtgcttctgggagtgagcttgtgcttcaagatctgtcaacaggggcaccttgctactcctcctcgtggtattttatcctctaggtggctaacatggactttattgatggagacagcagcattctgaaagaaaagcagaagcattcaacaccatttgagcccaggccccaaactagcccactgtcatgttcacaagtatctagtgccttgaacaaataaggccagccagatctagggttgggaaaacagattctgtatctcaatgggaacagctgtaagagcacctgccaataggcatggataggagggatgaaaaattgctaccatttttgcaatcaatatcattatgccttttttgcatatgtggtttatacaactctttcgcatcaagaaacttgtccaaagactcacagctactaaatggctggcctgagactcagtaccaactcttctgactctaaagcccatgcatcaaactcttggctgctgtagatccttgaaatcctggagagagatgctgctacagtaaaagccagatttttaaaaaatgtatgcccatatagcactatttatgattgggaataatcctttcaagaaattgcagaagcacagggtgcctcacacctgtaatcctagcattttgggaggctgagatgaaagaatcacttgagttcaggagtttacgtgcaacctgggcaacatagtaagatcctgtgtccgtgaaaaaaaatttaaaaattggccagtcatgatgttgcatgtctgtcgtctcagctcttcgggtggctgaggcaggaggattggttgagcctgaagtgttaaggttgctgtgagacatgattggttgcaccactacactccacccagagtgatacagagagacactgtctcaaaaaaattgcagaagcatttgaatggacatataataattttgaaaaatagctgaggaatgagtttagaaaaatcaaagcccaagaacacattatttattttcatcatagaaaaaagaaaaagaaactttagagaaattaaatttatcagagtttaattgagaaaagaatgatttgcaaattgggtagcctgtgtaggctcagagagtctccagcatagccacatggtggtaaaaaatttatgaacagaaaaggcaaattgacatgcggaaaatggaagccaggtaccgaaacagtcagattgattacagcttgggagttgccttatggtttgaacagttgacgtcattttactggccaaaacacattgattggtacaagaatgggtacagtctatttacatatccaggtaggtttcagtttagtattttaaataaaaacgaccaaaattaaacgtgaaagggggcagctttatggtgtaattaatttaataatttgtccttttggtcatcttaattttgagagatagaccaaaactttagacattggccgggcgtgatggctcatggctgttatcctagcattttggaaggccgaggtgggtggatcacttgaggtcaggagtttgagaccagcttgaccaacatggtgaaaccccgtctctattaaaaatacaaaccaattagccaggcctgttggtgagtgcctgtaatcccagctactcaggagactgaggcaggagaatttcttgaacccgggaggaagaggttgcagtgggctgagatcgcgacactgcactccagcatgggcaacagagcgagactccatctaaaaaaaaaaaaaaaacttggatattgatattactctctcactataaaagaagtacttatttagtctgaaatcccactgtgaaatagcataactgtggattttttaaagtagaaacaaggacttcaggttattattattttattattattatttatttttaaaagagtagagggaaactccttgtgttgaaatgtgctgtttaccaaaacaaacagacaaacaaacctcatctgttttaggatgtacctattttcttttttctttctttttgtttttgagattgagtttcactattgttgcccaggctggagtgcaatggcgccatctcagctcactgcaacctccacctcccgagttcaagcaatcctcctgtctcagcctcccaagtagctgggattacaggcatgtgccaccacgcccgcctaattttgtatttttagtagagatggggtttcactatgttggtcaggttggtcttgaactccaggcgtcaggtgatccacccacctcagcctcccaaagtgctgggattacaggcatgagccactgtgcccagccctacctattttctgaaattttcaatttgattatgtcacatttagcatgagtgacttactttttttgttttgtttttctgtttgaacctagtgcagaagttaagaatgatggcctccgataaatttgtttaaaaaattctcccattttggcaaagttctcacatagatcagagtgtaaaaaactcacgatcttagtgccactgtcaatttccattatttttgggttttgtccatattatgtcattcataggttatggtgtctccatagtcacatatgtctcaattgttgtcattctagttaaagagagaccatttgtcattctagagatgactcatgcatgataacatttaaaacttttgagctgaggtggaaggattacttgagcccgggggtggaggttgcagtgagctgagatcacacccctgcattctagcctggctgacagagtgagaccctgtctctaaaatgcaatgcaacgcaacgcaacgcaacgcaacgcaacgcaatgcaatgcataaaatagcctcaaccatgttccaacaattactttcttttttcttctccaacaataaccataaccttttttttttttttttgagacagagtcttgctctgtcacccaggctggagtgcagtggcgcaatgtcgactcactgcaacctccacctcccaggtttaagaaattctctgcctcaccctcccaaatagctgggattacaggcacgtgccacctcgcccatctaatttttttgtatttttagtagagatgaggtttcatcatctgggccaggctggtcttgtactcctgaccttgtgatcctcttgcctcagcctcccaaagtggtaggattacaggcgtgagccattgcacctagacaataaccataatcttaagagttaacattgtagatcaattttgtgtttttattcaagtgttttgttacaaaaaattaaacatatgcaaaacaacaacaacaaaaataatttaatagacctatcatgaagcttcaacaactactaatcttgtgccattctggtttcacctattcttctctacttcggtcatccctggccaacccattgtccacccttcattattttcttcagttttgttttttgtgacgtcatatgtacatacattggaaggcacaaatcctaactgaagatttttgacaaataaatacacccatatgaccttcatatcttttaagaataaatagaatgtttcccttctctattaatagaatttataataaaatgatagaatattcttattattctcagataattccctcctgcttttttcagacaattttaatctctaccgaggctacttggtattttttttttttaccattagttcatttttccagacattatacaatttgtattattttatttcaagcttgtctcagcaggtttatgagattcatccaaggtgtgtgcttcagtttgtttctttctatggctgagtagccttctcttgtatgaatgagctatgatttgtttattcatcttcctagacatggacatttgggttgttttctgctttaagctattatgactaaaaggtctataaacattctggtacaaatactttttcatatataatttaatttctttactagcatttaaatgacaactctttacattttttagtggtttctttagggataaccatatgcatctttaacatatcacaatctacctagagttaatactgtacaattgtaataaatgtaaaatatgaagaccttgctatggatgagctttacttacctccttttatttttatgctattcataaattttacatctacacattctatatctcacaatacttacaatttctcctttagtcataagtcttataaagaaattaagagaaaatggtattataaatatttggaggcagatattttgggctatgtaaatacactgtttctcctttaaattttacccacaatttgtgcattctttaatacatctttatctacagtaattattactgtggtgtcctggtagtgatttcctattttgcattatctatctacattgattagtacttagaattctgttaagaagatttgctttggccgggcgcggtggctcacgcctgtaatcccagcactttgggaggccgaggcgggtggatcatgaggtcaggagatcgagaccaccctggctaacaaggtgaaaccccgtctctactaaaaatacaaaaaattagccgggcgcggtggcgggcgcctgtagtcccagctactcgggaggctgaggcaggagaatggcgtgaacccgggaagcggagcttgcagtgagccgagattgcgccactgcagtccgcagtccgacctgggcgacagagcgagactccgtctcaaaaaaaaaaaaaaaaaaaaaaaaaagatttgctttttctctttcttctttccttttttcttattatattttgtctatatctgcatggactcatgtatagctcttttattctctaggttataatccaagggtattattattttgtttctcacattgtttcagcttgggctgctggaaactctttcaggttcacttcctctgacatgtctctttctgttgttcataaagcactttttaactttctagctttacaaaatactctaccttaagtttgatttttcactccagtcccagaattatctatttgtccaagtagtgttgcttccttctattgaagaatagtacttaggaaccataatatgagagctaggtattcttattaatactggggtgttactgcttctgaaagctctcagcagacagagtttggaaatgtacatattaatatacactcacatataaaaacatctcttcctttctctttctctgtgtctccctctctctgaatgaataaattatgagacctgcatttatccaaatattcctggctagggatggtggctcatgcctgtaaacccaggatgtttagctcagaatgattcatcctgaccctcacagcagaccagtcaggtggaaaagggtacagggaattatggtccttattacttgttttttgttttgttttgttttgttttgtttttgagacagagtctcactctgttactcaggctggagtgcaatggcgcaatctcatctcaccacaacctccgctgcccaggtgcaagcgattctcctgcctcagcctcctgagtagctgggactataggagcacaccaccacgtctggctaatttttatatttttagtacagatggggttttgccgtgttggccaggctggtctcaaattcctgacttcaggtgatccacccatctcggcctcccaaactgctaggattacaggcatgatccaccatacccggccagtctttattacttttattgtctgattgtttattgctagtttagtttaaaaagttgacttttgtttattgaagctgtatgtaatgaacttggtaaattcacttgcaaattcttacagatttgctacacaagataatcattatgtgcaaatgaccgttttattttttcctattaaattttttttttccttaccttattgcactggctaggatctccaatgaaatataatagaatcaataatagcaggcatccttgtctttttcctgatctaggaggggaaacttttagtagtttaccattgagaatcataataactggccaggcacagtggctcatggctgtaatcccagcaatttgggagtccgaggtggatggatcacttgaggccaggagtttgagaccagcgtggccaacatggtgaaaccccatctccactaaaaatacaaaaattagtaatgcacgcctgtaatcccaactactttggagtctgaagcaggagaatcacttaaacctgggaggtggaggttgctgtgagccggggtcacgctgctgcactccagcctgggcaacagagcaagactctgccaaaaaaaaaaaaaaaaaaaaaaaaaaaaagaattctgatgcttactatagattgttgaaaagtaggtaccttttattaaattaggtaagttttctttcattctagattgctgctttttagaaaattatgaattggtgttcaattttttctttttttgagatggagtcctgttctgtcgcccaggctggagttcagtggtgcaatctcggcttactgcagcctctgcctcccgggttgttctcctgcctcagcctcccaagtagctgggattacaggtgctgccaccacgcccagctaattttttttttgtatttttagtagggatggagtttcaccatgttggctaggctggtcttgaactcctgaccttgtgatctggctgcctcagcctcccaaagtgctaggattacaggtgtaagccaccgcgccaggccagtgttcaattttttttttttttttttttttagatggagtttcgctcttgttacccaggctggagtgcaatggcatgatatcagctcaccgcaacctccgcctcccaagtttaagggattctcctgcctcagcctcccatggtgttcaatttttaaaaatgcttttcctacatctgttaagataatcttgtagatttttctacttattctgttaatgaaataatttcatgagcggttctcaaccgagggtaatttttctccctagagagcatttggcaatgtctggagacatttgtgattggctcaattgggtgtgtgtctgtgctactggcatctagtgggtagaagccaggggtggtgacaaacattctacaatgcacagaatgtctccccacaacaaagaatattcaactaaaattgttaatagtattgaggtgtggaaatcctaattcacattgcttaatctttgagtgttaaacggaacttcatgagagagacgggcctataatttttctttcatgtaatgtccttgtagttttgtcattaaggattcttttggtctcataaaatgaattagaacatgttctctctttttcaattttctggaagaatttgtgtaagatagatgcactctttgccttcctttacaatcagacctgcctctggtcaccttttcaactccagaagtcatttatgtcctttgaccctaagatatttgctgaaccaaacgggattagtatttcttaaagatcagaactcacctgagcctactggattctagcaggaatggagacaggtagaaagactcactttagcctcaggcttaaatatgtttttatttatttatttatttattttaatttttgagacagagtctcgctctgtcgcccaggctggagtgcagtgccgtgatctcggctcactgaaacacccacctccccggttcaagcctcagcctcccgagtggctgggactacaggcatgtgccaccatgcccagctaattttttgtatttttagtagagatggggtttcactctgttagccaggatggtctcgatctcctgaccttgtgatctgactgtctcagccttccaaagcactgggattacaagcatgagccaccgcatccagcagtatgtttttattttttattttcttgagaaagagtcccactctgtcacccaggctggagtgcagtggtgtaattttggctcactgtaacctccacctcttggattcaagtgattctcctgcctcagcctcccaagtagctaagattacaggtgtgtgccagcacactccactaatttttatatttttagtagagatggtgctttgccattttggccaggctggtcttgaacttctgacctcaggtgatccacccacctcggcctcccaaagtgctgggattacaggcatgagccaccgcgctcgaccaggcctaagttttatactctacctcagacttttatcattttggcagttattggacactaagtcaaatactaacaaagtgagccagtgattcgcatttagctattgttccttgtctatagcaccttgggtaggaaccctatgggaagatcaaggcaggataaagccttccttgggatgctggccataacactatcacagcagcgatgaaatcttaccttctaccactcccatccactgtgtcttctgttgttaactaaacattcagctcctttcttggggtggaatgccttttagtttattctacaccttgactgtcacagggggtcagtaataggggagaacacaagtttctggttagataaatctgggtcgaattctacttttgccactattagtagagttacccctaacaaaacatttagcttttccagtgaagcctctgtttactcatctgtggagtgggacttataatgtctacttgtgtgggttaagaagacaagaattcattaacctatttcccacttgccctgagaacactcatgtttctaatcctaatgtgacatcatatacatttctgttacattaggactagagacaagttttgtttagaaataacttcacaaacagtttttatattttattttcaagataaaaatcattcagatttgcttcagcttcaaggaggatgtttatgtaaaattaaatgagcactggcaaccagctgcaccttttcttctaaacgggaaatgggttaagtggtttagatggctctcagcctcaaagggctgaagacagaaactctaggctcaatttccagaaatggctctcaacaccacatagagctggtccatcagaggagctcctgcttcatccaaaggcaggaagcactaaatcagaagattgccttagagttaggaagtcaatgctggactcaagcccacaaaatgtcctcgtcctgcctatctctttgctcgattcaaaatcccattcatgtggagctaattggagaaatcaaaatcacatttttttttttttgagataaaacagacaaaaatttctgctcttgagaaatgtatattttaagatgagacttgttaaaagagacctctgtcttattttgtatgtatgtagagccatggaagtctagagctttgatgtatgatgaatatgtgtttcaatcttctctgttctataatcttgggcagctattttaacttctttgagcctcagctttctcaatcctaaagtgaagatacaaattcctatcttatcctcaatcagttaaatgtagaattaactatatgatcctgcaagttcatccttaggttacatacccagggaaaatgaaagcatacatccacacaaaaacttgtatgtgagtgttcatagctgcagtattcataatggccaaaagtagaaacaagtcaaatgtctgtcaattaatgaataattaagcaaaatgtggtatatccatacaatggaatattattcagcaataaaaaggaatgaagtaccaacacatgttaagacatggatgtacctttcacgtagcatattatgtgaaagccagacacaaaaggtcacattttctatgttttcatttatataaaatgtttagaatgtgcaaatccacactcagaagttagattagtgattgcctaggactggaagccagggagtaattagggtgtcatggttaaggggcgtagaatttcttctgagggtaataaaactgttctaagatagattcgattttagtagtgatagatgaacaactctgtgaatttactgaaagccattaaattgtacactttaaatgagtgatttttctagtatgcaaattatatttcaaaaaagttgtaagaagaaaaagttctaccatgtagggttctttgaagattaaataagctaggaatacaatatacctagtgtacctagtatacatagtgcctggcatttggtaggtgttcaaaatatgctaacatttattctgttggtaatccttaacaggctggtttatacaaaagcttacaattatgttcattgttaacataatactgatgtatcctttcgtaatcaatgtgtgccttgagcagatagcccttctttaccctcagttccagccctttctttgcttcttgaaattttacgtgtatcacaacccagctcagatgtcaccttttcaaagcctccttgttggttcagctaaaaatcctgggctttctgtatagcatccccaacaaggggcattcagaggcaagctctggtcaccatctggcttgtttccaaattatttgtgaatgcaccacctgtccctgtgtcctgccctctgtttctggcatggtggcacctggcacagagggagtgatcctgtaaggaatgtgttcacagcacatgtgctctgagtcccttggcacagcacctatggtgggcagaattctgagatgattctcctgacctctgccccctggtgttaatgctataattatgtgacatggcaagagaaattttgtggatgtcattaaagttagtaatcagcagaccttatgctagggagatgggtgggcctaacctaatcacagaagccctttgaaagcagagtcttctttggctagaaaaggccatcagaggttcatagtgggagacagatttgacttgaggctggttttcagttactgagttggaggggtccctgagacagaactgagaacagtctctaggagcagagagcagcaccttggctggcagctataaagaaggacctgggtccgggcgcagtggcccatgcctgtaatcccagcacttgggaggccaaggcaggtggatcacctgaggtcaggagtttgagactagcctggccaacatggtgaaaccccgtctctactaaaaatacaaaaattagccaggcatggtggcaggtgcctgtaatcccagctactcgggagactgaggtagaaaaatcgcttgaacctggaggtggaggttgcagtgagctgagattgggccactgcactccaacctgggcaagagagcaagactccatcgcaaaaaaaacaaaaaaaagaaagacctggttactacaattgcaaggacctgaattctgccaatgacctgaatgagcttggaagtggattctccccaagagccttcagagaagggcccagcccagccaacaccttgactttggccttgtgggaccctaagcagggagcccggttaaacccacctggacttctgacttatagaactatgaggaagtcaatagggattattataaactgctacatttgtcatagtttgttgtgctacagtagaatacaaatatatccctcatctctggagagcagttttattcctattttacaagtgaggagacccagaggggtgaagtcacttgcccaagattgcactgcacatgaatgacagggctgagctacagcctagggcaggagtcaacaaatattttcttttctttttttttttttttgagatgaagtctcgctcttgtcccccaggctgcaatgcaatggtgcaatctcggctcactgcaacctccacctcccaggttcaatagattctcctgcctgagcctcccgagtagctgggattacaggtgaccgccaccatgcctggctaatttttgtatttttagtagagactgggtttcaccatgttggccaggctggtctcgaactcctgacctcaggtgatccgcccgtctcagcctcccaaagtgctgggattacaggtgtgagccaccgcacccggcccaaacattttctataaagttaaatatcttaggctttgtaggcctaaaatatttacaatttggatctttacagaaaatgtttgctgactcttttaggatcttgaatctgagaatcttgtttctattggtgttaaggatgtgctcaggtatctttctataaagatactcctgctacagagcttgctgggccttggctgctcaatgcaggccttgagacatccctgtggaaatgtatcatgttcctaggcagggaacagagcaacccaccatcacatcgcccatgctggccatgacatggtggcctactgtgtgctgtttggagatggtatgggggtggggacaggacatgacatgtgcttacctgccctccagatgctgtacacaggggagccagatatataagcaaataattagcatgcatgggctatggaaaggtgctcacgatggatcacgttcaataaaaaactatatgcaatgcatgcccagagttttgtaaaatacacgttaggaaaaagttatatcaaaaatgtcacagtgatgggtggtctctgcgtggtaatgagtcttaagtcactggaaaagaacattggacccctgtcctggaggagggagaaaggaggttcttccaagaagatcgtggattctcccattgcttctctcctacttacagatttaaaaaaaaatagctaatatcactaagcacttactataagccaagcactgtcgccaagcatattatataataactcatttaaccctcatgccatctctaccagacctatctgattccagtgcttagtacttgtttctccaagtgtggctgcatttaggggaatgtttttccttctttgtagggttcgaaactgttctttatctgttaagggagatattctgatttcttttaactgactgatattttctaatttttctgcagtttccagcgttttttttttttgaaatggagtctcactctgttgcccaggctggagtgcagtgggaccatctcagcttactgcaacctctgcctcgcgggttgaagcaattctcctgcctcagcctcctgagtagctgggactacaggtgcatgccaccaagcccagctaatttttgtatttttagtagagatgaggtttcaccatgttggccaggatggtctcgatttcctgacctcgtgatccacctgcctcgggttcctaaagtgctgggattacaggcctgagccactgtgcccggcctagctatcttttttccactggaaaaaagaaggaaggcttgcaggtttatttttgtcagcatgtcgagggatatgatgtatggacctggaaagtcctgtgaaagcctagaagagagactggttcataccactttaggaaactgaagagaagtcacccacagaaggtgacctgaattttaaaggaagtgcatgagttcaccagatgaaagaacttttgtagccaaggtgtgacattagacccgggacacaataaacagtgaatttaggtgcaggaagtgagactaggaggtggccagggacctcatcacaaggttgtggatgcttaggaactgggattattccgagggcaatgaggagccactgaaaggcacagccagggctgggcgcggtggctcatgcctgtaatcccagcaatttgggaggctgaaatgggcggatctcctgagatcaggagtttgagaccagcctggccaacatggcgaaaacctgtctctactaaaaatacaaaaaaattagccaggcatggtggtggtggcctgtaataccagctactcgggaggctgaggcaagagaactgcttgaaccctggagtcggaggttgcagtgggcccagactgtgccattgcactccactctggtcaacagagtgggtctccatctcgaaaaaaaaaaaaaaggcacagccaggtgagggactggttgggtgctgttttggtagctcaagctggtgcttcatgaagggcaggcagcctggggacagagaggccagtgagaggcaggagcagcagcccaggctgtcactgaggagggaacaatgtggcaaaaatggagaagtgcataggagtctggaaggtccagacagatgtgggaaccccacctcctctccccactccccactcacttattagctgtgaaacccaagcaaggcactgccctctgagcctttatgacttagccacttttcactaaatgtgaaaagtgcctgactggtgaccagtaataagtaggtgaagtggtagctcctttccctgccctgttgaggcggaagctggtgaccaagggttccctctgagtgacccagctggtggcagggaaaatctgaggctgcttgttcagagagggttaccactatgcccgggcagcacggcagacttgctgctgggaccagttctggaggtcagagacctggagggcttggtgtctgacggctgaacaaacaagctggttgaggcgaggttgccgtgagccgagatcgcgccattcaccccagcctgggcaacaagagcgaaactccgtctcaaaaaaaaaaaaaaatgccggttttgtcaaagcagcaggtggcaaacactgagtcaaaagactttcccggccgggcacagtggctcacgcctgtaatcccagcactttgagaggccgaggcgggcggatcacaaggtcaagagattgagaccatcctggccaacatggtgaaaccccgtctctattaaaagtataaaaattagctgggcatggtggcgggcgcctgtagtcccagctacttgggaggctgaggcaggagaatcgcttgaacccgggaggcggaggttgtagtgagccgagatcacgccattacactccagcctgggcgacagagcgagactccgtctcaaaaaaaaaaaaaaaaaaaaaaaaaagactttcccctctttgggcctcagtttccctttctgtaaaatgcaggtgaagaggcatgagctcaggattcctaaagccctacggggctgagcaaggacggtgctttgcgtttgcctcccttcccccagcccgcccgagagggtttgctggggcagggtggcccctgggacgggttccagacagttctaggcgctcaggtccgcagctgtgctacccccgccgcccgggacgcccggtccccgccagggccctctcactgtagctttaaggagggctggggccgggtgcagcggcacctggagtctcggtggaacccggcagcggtgggcgcggaccccggagaggctgccccgagcccgagcaccccctgaccgggcgctcaccacgggtgttgggacaagcagcggagcctgcgggctggagccaggctcggaccctccgcgccggggcgggcggccgagcggacgcagctggcagtggcggcgggagagcgccccggatccgcccggagcccaaccccgtggcacttcggctggctgggcagcggcgctggggacaacgcggggccttctgcaacgagcgcctgcgtgggactccaggggccggcgccccgctccgctccccccaggcctcaaccccgctggctacccgcgctgaaacctcacctgccgccggctgcaaacggactgcgctccaggtgggtggaaacgtccttctcctactttctgggctcactcggctccctgtgacgcgatcccgcttgcacccttgcccttcacgttgaccgcagtggctggtgggcagtgggggacaccctgggctccgcctgggttttctcttgctggtgacttgggccctggcgctcagtgtccctggtcgttagacaagggtgccttgagccacttgttgttcaggcggtttcttctttacagaaagtggccccccacacgcccttcctggtggcaggagcagggcagtgggcagcgtttctgccctgctccatggggctggggttggaggcggctctcccattcctgctgtccggacaggagcggggcctttctatccgcagacttttgctgaagacactgtcccccgcccccgcccctacgccagcggcagagaagagatccaggctggccccgctcctggttggtgggcagggcaagctggaggggggggcaggtactaagtgttgctgtggaaataaaaatcattgtaacaggagaataaatggttttcgtatattttaattctatcaaaaggatattcttctgcccatttgacagaggaaggcaccacgtggagaagcttcataacatgagggccagggcccatcctctgtccatccctgggtaacctgcttcccttacagctcgctgtctcacgctctcatcttcataacctgcatcccctggagcagagattcgagctcagaggtgttgagcagcctctgcaaggtcccagagttcagaggaggaaggaccaccatagtgacagggagtgacaggtggagccatctggtcagggagcaccctcccctggctggagggaggtggggacagccgcagacaggcttcagggaaggggtgaaatgagggccctggatgggagcagagggttccctggaatggggcacaggcctagtagaggcttccaggtgataggagtttggggggagggcatttgagggaggcagggccaccctccgaggccctgcatgagtgctagggttgggggtgggacttctcagggacaggggagttcctggcttgccctggggtgggcttatgcattccagggcaggtaactcttcttttcctagcagggtacaggttctggaggtacacagtgtaagggaccagtaacctgcttcaccaattctctgatatggctcaaggaaattcttggggtgggacaccctgctgacagttactgcaaaaatagtcacggcaaaacaaaacaggctgtccttcatccagtagacactgaccctctccacgtgcccctaatcccccagatggcaggttagcacgtgccctgcctgccatgggggagccacatggaaggagggagacccacatagaaggagatgaccatgatgccacgtgagaccatgcaaaggacaattgcaggggctggtccaaggtgtgggagaggttaagccagtaaggcaggcagtgcattccagagtgagagctgcctatgccaaagacttaacacctgcacccattcacagcatggcctcaactttatgtattaaaagatagtggctgggcgtggtagctcacgcctataattccagcactttcagaggccaggttgggcagatcatgaggtcaagagatcgagaccattctggacaacatggtgtgttgggagcaagccccccaaagtctggccataaactggtccccaaactggccataaacaaaatctctgcagcactataacatgtccataatagccctaacgcccaagctggaaggttgtaggtttacaggaatgagggcaaggaacacctggcccgcccagggtggaaaaccacttaaaggcattcttaagccacaaacaaaagcctgagagatctgtgtcttaagggcatgttcctgctgcagttaactagcccaacctattcaattaatttggcccatcccttcgtttcacataagggatacttttagttaatttaacatctatagaaacaatgctaatgactgatttgctgttaataaatatgtgggtaaatctctgttcagagctctaagctctgaaggctgtgagacccctgatttcccacttcacacctctgtatttctgtgtgtgtctttaattcctctagcgccgctacgttaaggtctcccgaccgagctggtctcggcaatggtgaaacctcgtctctactaaaaatacaaaaaattagctgggtgtggtggcacgtgcctgtagtcccagccacatgggaggctgaggcaggagaatcgcttgaacacgggaggcggaggttacagtgagctgagatcacaccactgcactccagcctggcgacagagcgagactccatcttaaaaaaaaatagtgataagctgggcacggtggtttatgcctgtgatcccagcactttgggaggccgaggtgggtcgatcacttgaagtcaggagtttgagaccagcctgaccaacatggtgaaaccctgtctgtactaataatacaaaattagctggacgtggtggtgcatgtctgtaatcccagctactcgggaggctgaggcaggagaattgcttgaacccgggaggtggaggttgcagtaagccaagatcacgccattgcactccagcctgggtggcaagagcgaaactccgtctcaacaacaaaaacaacaacaaaaatagtgataaacttggctgtgcacacaggcagggatttgattcagactagagctgggtccaaatccagcagcaaccttggacaaggggtcaccctaggagtcccagtgttcttgggacataacactattgtgaggaataagtgaagagatgtctgtaaagtgcttagcatggtgcccggcctctaagtgcccagcacacacctggtgccaccatcgtcctgtgtggtgtggagagaaagggagaaatgcacagggcaagggagaaatggacaagatactttatatggagattatgctcatctgtgagaagcaagatttgtggggatttgtatttttcattctcattttcctgtggctttctctttttcccacaatgagcagcagctattgtatcgatagaaagtaaaatgtgttgtaagttgccttgtgcaggtgtgcccagatgcgagctcctctagtgctgataaccctgctgtacccggctacaggcaagattcttcaccatttggggttcagtctcctcatctgtaacatgggaattttctccagcccagccaccttcccccaaagtgttttttcctcttttttttttttttttttttttttttgagacagagtctccctctgtcaactggactggagtgcagtggcacaatcttggctcactgcaaactccacctcccaggtttcaacaatgctcctgcctcagcctccagagtagctgggattagaggtgcgtgccaccacacccggctaatttttgtatttttggtagagatggggtttcaccatgttggccaggctggtctcgagctcctgacctcaagtgatccactggcctcggcctcccaaagtgctgggattacaggcgtgcgccactgcgcctggccaagtgttttctcctcctaacagcctttcctggctgtcaactttgaggagtggcaggtagtcaggttctttttctctctccatgaaaatgctttgatctggagacaggaagtacttgcccccaggacagattcacaggaggcgaactgcagggaatttacaaatggcattgtatgtgtccagtagtctaagggttcaaagatactggggtccattcccagagcactccttttacatgtatacattctctctctctctctctctctctctcacacacacagacacacacacatgcacacacacacatttgtaaacatatttgaaactatacccctttgaaatctaaagtttcacctcctatatcttaaaaatgtaccatgcctttcacctcccacaggaatatgactttgcaccactgtgtattgtcgtttggctgggcaagccccattttgaagggattgctggttcctgacatcttccttagggtttatgctcctttgcttcctgctgcaccaactcagcctctggaagagcagacagctggtgtatctgcaaatcctcctctcagcctgccagagtgcctgccctttaagtgatagcaggcccaggcagttgagtggttttccccaggacaagctgcagagcgagaaccaaatccaggactgcactccctcaacagtgctgtggcagctggaatcctgcattcttgcccctttctcagctctttgcaatggtgggggaggattttcacccaatgagtatctgctcatccagcagcactttccctcatttcagaagatttactcaatgaacatttattgagcagctattatgtgctaggcactggggggatatagtggtgaacaaagccagaatggatccagccctctgggagctcacagtctgggatagtggacaggtgtagcagaagttaggacaggtgcatgctgtggtgaggacagcccagaggacttgggtgttaaagtgaaaagtgtcagcagagaaggcgtctcagatgaggctgagctggcccttgaagagagataatgggataacctggacctaggtttcagcctcttagcatggtctggggccaggtttttacccaggtttatccccccatccatggttttctttacttaatttagataacactctatatatttcttggtatacttaagttgaaaaaaagtaacatatcgtaactgttttctcctgttattaaacctttttgctgagcttgattttttaaaaactattaatattagttacttcatctagaagttatgtcatattttacttaccatttctttataattggacacttgagcatttttcaaatgataacccttataaacaagggcatggtgaacatctttttgcacaaagttttgctccatgttgttagtttcagtttcagacatttgaatgctctgtttcaatgttctgtttgccctaggtcccagtgtcttctttgtccagtggagttaacagcgtggatctcatgggattgtgaccacgtgaagtaaggcagagcatagccagcaaaccctgattctggcaggcctggtccacccaacaagtattcattctcctccctctcagcttcccataaggcatcagggtgggcaatcattattattattattgtttgagacaaagtcttgctcttgtcccccaggctggtgtgcgatggcgtgatctcagctcactgcaaccttcgcctcctgggttcaagcgattctcctgcctcagtctcctgagtagctgggattacaggcatgtgctagcacgcccggctaatttttgtatttttagtagagatggggtttcaccatgttggccaggctgatctcgaactcctgacctccggtgatcctcccaccttggcctcccaaagcgctgggattacaggtgtgagccaccacacccggccgtgggtggggaatcttaatatgcagcagtagatgaggctcctgaggactggggagaggcctagagtgtcacacttagttcctaccatgtcccaggcgcagtgctgatacccattatctctgaccttcaaaatagtgctgcaaagtccgggacaccatctccattttgcagatgaagaaactgaggcacagaggtgtcaaatgacctctccaaggttgtaaagtgacctagggtagagaaatactaacacctaggtctccagtacctttcatgtgacccatttcgtcttctctctcctgtgtccagatgtgtgatgggggcctctactattgcatgatggtcagcaccatggtggttcttgtggctgggacactgcttgacttggtggagccaaggggatgcacgtgcccagcctggccagctgtcccacccacagaacaccctgtgcctggggaccccagccccggctccagtgggtcagttccttctgttgtggcacaggtggcctgctgctgctcctcagtctgctgtggtctggcagggccagcacccaggggtcacctgatgggacccacgccacctttccagaggcctgcaccacctcacagtggaatcctcagaggagagctgcaagtcactggggcagggtgggccagtggttggggaccacaggtgggggcttagtcacaccattcagcatttgcttagtaaactctcatggggttccttatctgggccagcccttgccctgtactctggggacattctagaagccaaacagtgcagtcctgagggaatttaaagcaccatgacaaagggagacaatgacaaactagaaaagttggagctgttagagataggcagacatgatcttatggtgacacggagaaacccaggaaggctttctagaggaggggggcagctgagctcagcatgcagtttgtattgcgagcattatatgtaaacatccagccacagttggaatgctgactaatttcttaacccagcttatagccagtagaagactctcctatctggacccagacagttgaagagatgttggttctcatacctgggttcagggccataggtatgatcatgggttaataccaacatagggactcagagagaattgtgactctcatgcataccagttaaagcctcaggccagtaagcgtcctaacagggcctagtacacagatgagactgtaacactcatatgcacccccatcccacaataaagattgtcatccacacacatgaacacaactcactgttgaggttctgaatctcacagctggagacagttgaaagtttgaacattgactcttgtaagtggatccggtccaccagtgggttggcgactctcagaccaagattcaacacaccgtgaggcttttactccactgaggagacactgtctacaggaagaattgaggctctcagtatagattgtccaccattgtgtctcatgtacttagacccaaaatacaggtgttgactttcatacctaaaacaaggacatgttcagtattgttaatctcatccctgggccttcctgcaggagtgattttaacatctgcctctgctcaacacttgggtgattttattctccttccttagctcagcccacggatgggattgtgacatatctcttggccaccatccagctgatgtgactcttctctttttgctaggttctgctcaagaagagattctgacatattgttggaccaaacaccaaggttatgtcacttttgtgccttggccctgacctcagaaggcattgcgacatactgttgggttaatcaccaaggtgatgtgggacttctgcctggaccctgcccacactgggcattgtgacatttagggcccatcaactatctggcatggccctcctctcttatctgaccgttgcctataggagagattgtaacacatctctggatttagaatgtagatgatgtgactcttctctcctgactgggccatggccagagaagggagagtgacttaccactggatccagcacacaggttatatgattcttctttgtgatctctgcacaaaggggtcattgtgagatatctcagggtttatcacctagatgatgtgatgctccttttcttcctggaacctgtctacagtgggcattgtgacatatcacttggcccagcacctacatgttgtgactctgatctcatgcctgggccctgcccactggggtgattgtgacatataagctgggcacagccatgaggttatatgacactcctctttttttgagttctactcacagggggcattgtgacatacctctgggctccttacctaggtgatgtgactctttccagggtcctcctgtcagtgggtattgtgcccaagatgtaattgtgatgcatcactggtcctagcacctaactgatgtgactctcctctccttccaaagccctgcatttattgtttattgtgacatattttcaaaacctaggttaggcaactcttttgcatgcgtcctgctaatagggctattatgacatatttttttttcacctaggtgatgtgactctccctttctgcctaaacactgtaaaaaggggagatcgtgacatatcactggacccagcatctaggtgatatggctctcctttttcaccttggcttcttgtattttgggtattatgacatatcactgggtcaaaccaaaggagggggaggctcttgcctaggccctgcccacaggagaccttgagacagatctctgcatccatcactttggaagtgtgactctcctcttctggctgctccatgcccgcacagaagactgtgatatatctccgggttcaccaaccaggtggtgtgtctcccatacctgggcttttcttgcagagataattgtgacaaatcgttgtgcacagcacccaagtcacgtgactctcctctcatatcaaggctctgccaactagggtaattgtgacatacagctgggcctagcccctaggttctatgactcttttgatgattctgagccctatctacagaggtcattgggaaatatctcttggcccatctactaggtaatggaactcacctgcctgggctctttttttaggaggtattgtgacatagggctggatccagacctaggtaatgtgactctcctctactgcttgggctttactcaaggaggaattgtgatgggtcactgaacccagcacctgggttatgtgttatgtgactttcctcttctgcctgggccctgcatcaattgtgttttttttttttttttttttgagatagtctcattctgttgcccaggctggagtgctgtggtgccatctcagctcactgtagcctccactgcccaggttcaagtgattctcctgactcagcctcccgagtagctaggattacaggcgtgagccaccacacccaactaatttttgtatttttagtagaaacggggttttaccatgttggccaggctggtctcaaactcctgacctcgagtgatccacttaccccagcctcccaaagtgctgggattacaggcatgagccactgcacctggccccctgcataaattatacattgtgacttcactgggtactaacacctagttgttctgactcctcagcatgggccccgcctacgggtgtattatgacatatctttttgttcctcacctaggtgacgtgactcttttttgtgtcttgaccctgcctaaaggggtgattgtgacatatcgccgaactcagcacctaagtgatgtgactctcctgttttgcctgggccctgcacatatttggcactgtgacaaatctctggaacaaatacccagggcatgagaggctcctgcctgggacctgcccaaaaggggccttttggcatatctctgcatcaattaactagcagatataactcttcttttctgcctaggttctgccaaaacaagtgattgcaacatataattggaccagcaactagatgatgtgactcttctcttctgcctgagccctggatatactgtgtattatgacacatggctgagtccaacatcaaggtaatgtgactctcctcaatgggttctgcccacagaggtattatgacatatctttatatttattatctaggttatgtgactcttttcatgtgcctgggccctgctgaagtagggattctgacataccactgaacctagcacctggatgatgtgactctcttttattgcctggttcctgcatattttgattattttcacatgtcactggctccagcacctaaataatgggagatagttgcttgtgccctgcatacagggggcattgtgatatgtgtctggacccatcaactatttgatgtgactctcctcttctacctgggctttgcaaataggaaagattgtgacatatctctgggacatatcttggtaatgtgagtctcctctcctgcctgggccatgcccacaaaagggagagtgacttctcactgggccaaggacaatgttgatgtgattcttctgcctggttcctgcacacaagagccattatgacctatctctgggcccatcatttagatgatgtgaccatctttttcctcctgatttctattcacagggggcatagtgcaagggtattgtgacatattgctggaccaagcacctaggcgatgtgactcctctctaatgcttggcttctgaccaaggaaaaattgtgatatatcactgtttccagcacctacgggatttgactctcctgaatgggccctgaatttattgtgtattgtgacatatggcttggtttgacacctacgtgatgtgactctcattcatatgcccactggggtattattacatatcttttctttatcacctaggtgatgtgactgaccacttctgcctgggccatgccgaaaaaaggagattgtgacatatcactgcattcaatacctagatgatgtaagttttttcttttgcgtggctctgcatatttttcatattgtgacatatcattggacccagcacctaggtgacgatactctattctcctgccttagcactggagaatagagtatcactggacgcagcacctagaagatgggactgtattctactgccttggcgcagcatacagagggtgttttcacatatcactgggccctgcacacaggttatgtggctctcctgtgacatattgctgggtccaacaagctggtgacacaaccctcctgctggggccctgcctccctggcattgtgacatacctctgtgcccatcaccgtggtgatgtgattctcttctcctgcctggtccctgatcacagaggggatggtgatatatcgctgaacccaacccctggctgacgtgacttttcttactaggctctgctcacagaggagattgtgtctttttgcttggcccaacgactaggtaatgttatttgttttgccttggccctgccctcagaaggcattgtgacatatttctgggcccagcataaaggttatgtgaatctcctgcttggaccctgctgacagggggaattgtgacatatctctggaatttgtcacatacaatttatcctaaattcccctgaaaattggaggtcatctctggttgctaattggctatattcaaaggaaaaataaacttatgctttcatgagaggtagtttggaaacttggagccaggtgcgtgatgaaagttggctcctatcttccaacaaaaagtgtggaatggagctctattttctttgctatttacattttaaataaatgattttcaggtcctagagaaagacagtcctgagtcagagatactcacaaaagacctatttagcagttagaataatttatatatatttcaagttggcagaaaaataatttaagtataaaagttttctgggctgggcgtggtgactcacacctgtaatcccagcattttgggaggccaaggcaggtggatcatgaggtcaggcattcaagaccagcctggccaagatggtgaaacgccatctctactaaaaactacaaaacttagccgggcgcagtgacaggtgcctgtaatcccagctactcaggaggctgaggcaggagaaccacttgaacctggatggcagaagttgcagtgagccaagatcacaccactgcactctagcctgggtgacagagtgagactccatctctaaaaaaaaaaaaagttttctaaagtgaatgtgtttaaaaaaagagaagagaaaaatctcttttttcatggacatctgaattctagtaggtgctggattcaggcacctgaggggtgaccttgggcatactgtgcacatcagaagggtttatggggaagtaaaagcagaagaggttgggcgcagtggctcatgcctgtaatcccagcactttgggaggccaaggtgggtgggtcacctgaggtcaggagttcaagaccaccctgacccacatggcgaaaccccgtatcttctaaaaatacacacaaaaaaatagctgggcatggtggtgggcacctgtaatcgcagccatttgggaggctgaggcaagagaattgcttgaacccaggagttggaggttgcagtgagccaagatcccaccactgcattccagcctgggcgatagagtgggactctgtctcaaaaaaaaaaaaaaaaaaaaagaaaggcaatagagggaaaggtgttatcaagaacccatgagtgggggacagtacataatagctgggagaactggtttatgctacagacactaacccaggcagggctatattctgacatgttcctgtgtccatacaggcagatgagattatgactggtggtccacaggtctaggtggatggagggaaaggttgctgctgctgtttgaggatcaagggtaggaaagagccaggagtcctctaggaacttgtgtgaattttttggtgagcaattctaggtgcaaaggccctataaacataattcctgatagtcaagtcttgttttgtggagggtgtggccacatctattcctagtgggtatgttcataagtaggtgagaatcgtgtggtagcaggttgggggcagggggtctgttctcagaactcctttcttctaagtcctcagtccccttttaccctgagaggagatctggaatcacaggacaatgtgcattgtgacagactgtgtgcaggggaacagagtttccctcctgcctaaacccctgggatattttttcctgacaccaaatgtatagagttttaacagcaaccaattctccaacaccaattggttgtccaataataactcaattctgataccatcctgagtcaacgcagacgccaaaagttcagggctcagtcccacaacactgcccccactgcagatcccagctgcgattattaggggcccatctatccttctgagctactgcctataaattgggggctcccataacctgctcctcaagtttaataacttaatataactactcacagaactcaacaaaacactatacatgcatttaccagtttattataaagatacaagtcaggaacagccaaatggaagaaatgtaaatggcaagaaaaagcggtgggggggaatggggtgggtaggtaacagcaacagctgtgattaaagaaatcccccatcctttgtgttttccaagagcatttactgcaaagaaacatctttcctgtttttgatatcacaaagccacagactctaaattcccttttttgggggtctcataaacaattaaataataagtttgtcttcagtggtcagaacaaaatacttgttaaccaaactttgtctaagtttctttccttcctcaggctcccaaactttgacctgaacttactctgagctgacacacaactcctctttatacccctcttaagaacaggctagccaggtgtagtggctcatgcctgtaatcccagcactatgggaggccaaggtgggcggatcacctgaggttaggagttcgaggccagcctgaacagcatggagaaatctcatctctactaaaaatacaaaattagccaggcatggtggtgcatgcctgtaatcccagctactgaggaggctgaggcaggagaattgctggagcccgggaggcagaggtttcagtgagctgagatcacaccattgcactccagcctgggaaacaagagcaaaactcggtctttaaaaaaacaacaacaacaaaaaatacaacaggctaacttctgggtgaaacattctctgatctgggacctgatttcaccatgttttattcctccctccccctcctacctttctttctgtcctgtttcctcctccttatgaaagaaagccctattctgcctaacttttgagatcttccagcatcttatagttggtgctttccctttgttgcaatactcctttaaaatcatgtaacttcttacctaaatctgaatttgtcttattttacaaaatctagaaatagccccaggaaaataacgactccatcctcagaaagagcttcccaaccccactttcatgccaatcccaactgtgtctgcctaaggatttccagcttttcagggttttgtcatttctctaagtataaaaggctctgtccatggctattgtgagcaggctagggcatctgcaggggaggctcctcaggcagaactggttgctccttcaataatctccctttgcaggcaaaactattgttagcttggggagtcactgaattcaggcttctacttcccagtcagggttattcacttagttttaaataagaaaatgctcaatgtttgaagaaaagagcaaaatcactcaaacacagtgtttatagaatattgtaaggaaattgtaaggcacttagtatctatttctttcagaaaataaacgtgtcatttaaatatttccatgataaataatttaataaataaccatatgggaacatttctagaaggtgctaagtctcatctcataaaatttagcattaaacttggacatccagaccacaggatacagaacacagatgtccactgttacaaattctagaccctgcaaaaaatgggagctgatgttttgaaaaatatatgcaattcaccagttaatctatcacatttgctgtggaaatatatcactttctgtagccataatgcaagagcgatttttcctatttatttccctggtagctttggtttttttttttttgttttttttttgttttttttgtttttttttgagacagagtttcactcttgttgcccaggctggagtgcaatagcttgatctcagctcaccgcaacctccgcctcccaggttcaagcaattctcctgcttcagcctcccgagtagcagggattacaggcatgggccaccatggccagcgaagtttgtatttttagtagagatgaggtttctccgtgttgatcaggctgatctcgaactcccaacctcaggtgatctgcctgcctcagcctcccaaagtgcaaggattataggtgtgagccaccgcactcagccttctggtagcattttcaaagaaaagccctggaattttacttgaaatcaccccccaaaaagaacacacataagaaacttactacactcactctggggataataaagatagataagaatctttaatgaaataaatatatgactagattttactgaaatccacctttctgggtacttgactcttgtaaaatgtcttaagttctactaataaaatgtaatttaaggtaattaaaaaactgaagttgaaataagtaaaataatctttccaaggtgacaaactcagggagtggcagtgccgattggaacacaaacatgtctgactcaactgtcaagtcagaccatggtatcactcaaaacattctcccattcccatcctacccattcaattactcagtgatcaccttcccaggagaaactgtactgtactccactgtgggcctcaggtacattttgttttgcaggttcttgcattgccttactaaaatgggttcttcttagtcctttggaaaaaaatttatttcttcacaaatctgatgaatccaaagggcaggaattatttctgccttttctcctcaatatgaacctctgattggctgatcaccaatgtgtctacaaagaataaaaattggggtttaaaaaaaccctttttttaactgcttgcacacttgtgcatttttatttcattggaggaaaatcctaaatacattgcagagtcaaggggtaaattaaaaaaataataatttcatttatttattttgagatggagtctcactctatcacccaggttggagtgcagtggcgcaatctcggctcactgcaacctccgcatactgggttcaagcgattcttgtgcctcagccttcccagtagcgggactacaggcatgcaccactatgcctggctaattttcatacttttagtagaggcggggtttcaccatgttggccaggttggtcttaaactggaataggaattaaaataaattaaagaatgtgtaaacagaaactcagctgtatgtaagaaaacccaattctccctgagaaagagaaagagctggagtcctttaaaaattaactgcctgtttttctgtggctagtgagccttatctcttctttcccaggcactgtttctctagctgtgcagctgcaaggtcactagacagataaactcaagtcgtaaaacatgtttttccttgaaaagtaagaatgatgtaatgcatgtctcaattaattgaataactgtctttctttctcgcttctgtaatatgcttccccctgcacagatctcccccaaccccacaaaatgcttaaaagataacttagctctttgttcagggctcagtcctttggatgtaatccgactaggccagtgaacctaaataataaatatcctcctcaacccctcggtctccctgattctttaaaatatcctgcaacatttctgggggcttatctgggtttggagatgatagatttactgtctcctttgccagtgtgtctagggccccggggatgggggagacccagcatccaagacgcaccatgagggggtttcacctggatggagaccagctctccccatgtcctggtgccctgcccagcagtgcaacagaactggggacagagatgcaggacaataccagcacttcaggaaccacgataaggagtagtggcccaaggcaggaaagcccgtcccatagggatgaaggggactgaccattaatccaacccagagtggctgggggcagcaggagtggcctgccaatttgattgaacctcgtgtccccactaacaaagtgaaaatggttcacagaatctggagacaggaactgggggtgtgtgggtgcatgtgaacctacctgggacatgagagaggctcatttcatccgatgaggagtcctggggtaggagtgatgggtttatgtgtgtgaatgtgggagcctaactaggctcacccaggacacaagagaggttcatttcatccagtgaggagtcctggggcaggggaggtgtgtgaaagtgtgtgaaagagatggtctcaggagaggccaacatggggactgatgtggggaggcacagatcccttagtgcaggctgtgtgctctgaggcgagtgtaggcaaaatcaaacctaggatgttgcatacggctgataggatcagctttgcagctgcagcaggctgtgacaggggaaggcacattcctggctaagcagcatccaaaactcctgtaataggacccagtctggtgaacctgagggtgaaaatgagagtgagagtgcactgcaagggaggaaatgagagggaaagcattgaaaccaactcctttggagtgcacgataaagaatttttttaaaaaaggatttagaggtgattatgggatgaaactggatgttcaaaagttaaagacatactgtgaattagaatagccctgttttagtgttggatggctggccgaaggcactatagagaaattggccatgtgttttaaggtggtgactaggatcagaggacagccaggacattcagacctagtctttatattgactcatggctaaatgaatgcagccctgcttagcagtttattgtagaacgctcacagctcatgccaagagaaaccagctgcactggcagctacagagttaaagggaaagtcacagaggcttatagcaccaaaagcaaaaagtgaaagccaaaagtgaaagtaaaaatcagccaccctggcagctatggagacaaaagaaaagtcttaggaaaaagaaaaccagttttgcaagaaccacaggagggaatagagacccctcctccctacattccaatctacccccctttaccaaggctaactgcccctaaggagttaagttcaaagagatacaggctcccagtctcacccgagaaagagaaatcagagctctgggaagttaaagcgaaaggctggaaaagtcaggcaggccatctcaggtcgagccatgcccaagttatgcttctgcctctaaaaaggacaagaggacccccaccaggatgcagatgatgcagtccaccttcagcacccacaaaagtgccgagaagcacttctgcaaaggctaaaggatggtaaaagaaaaaggcaaccaatataaaacatctcagaggtgctccagggtgcagataaaagcaccagccagttttatgaaagactttgtaaggcattttggttgcacactccatttaaccctgaggctgctgaaaatcagtgcaaggtgaatacggcatttgtaaggcagacccaaggagatatcaggcataaattgcagaagttagaagctctgtaggcatgaatgctactcagcttattaaagtggctaccagggtgtacattaacgagatcaggaggcaaagaagaaagctgatcagaggcttaagaaaggctaatttactagcagcagcccttgtgggaagagaagctggctttgcaaagaggcatggacgcaggcgtgaacacagtcacggaaaaggctagtccggacaggagtttgaaagctggccaaggctagagagagatttatgtgcacggtgcaaaaggaaaggacactagaaggatacacgtcaaaagaataaggagaatgggccgggcatggtggctgacgcttgtaatcccagcactttgggaggccgaggcaggtggatcacgacgtcaggaggtcgagaccatcctggctaacacggtgaaaccctgtctctactaaaaatacaaaaaaaaaaaaaaaaaaaaaaaaaaaaagccgggcatggtggcaggcacctgtagtcccagctactcgggaggctgaggcagaagaaaggcgtgaaccctggaggcggagcttgcagtgagctatcgcgccactgcactccagcctgggtgacagagcaagactccatctcaaaaacataaaaagaataaggagaattgtcaaggccatggtatgaaaaaaaaaaaccaccggccaagggctactgcacccaggaaaaacccaagaccccctgcacctgctgtgaaaggcaggatataaagtatcagaaaacagctcaaatctgctctaaaagtgtccagtatttaagcttttatataaaccaagaggaaagatggcttagtagtaaacaaaagcaggctgtttgtgtacttcctactccaacaacctggtgtcaaataagagagttcctaagggcagcaaggttctgccacatttagatcccaaatttcttgctcatggctaagccattatacaaagccacaaagaggaggaaagaaagagcctctcctctaggaggccaaccaggagaaggcttttatttatttatttttttttgaagccactccacaagtcactctatattgcaaattatacataatagtacacctaatcaatatataaatgttatgggttaaacatctacaacaaacaaaataacatttaacatcaagagaaaagaaatgggaaaaaaaggttaatgaaccagtccatgaagagcaacagagacaaaaagaatctcctggtctgggccaggcagtccagtggtcttgcaaggaacacctttgatgtgggtagagcctttcgtggcagatgccagagcctttcatggcagatgccatggagcttatcttttttttttttttttttttaaattgatcattcttgggtgtttctcgcagagggggatttggcagggtcataggacaatagtggagggaaggccagcagataaacaagtgaacaaaggtctctggttttcctaggcagaggaccctgcggccttccgcagtgtttgtgtccctgggtacttgagattagggagtggtgatgactcttaacgagcatgctgccttcaagcatctgtttaacaaagcacatcttgcaccacccttaatccatttaaccctgagtggacacagcacatgtttcagagagcacagggttaggggtaaggtcatagatcaacagcatcccaaggcagaagaatttttcttagtacagaacaaaatgaaaagtctcccatgtctactactttctacacagacacagcaaccatccgatttctcaatcttttccccacctttcccccttttctattccacaaaaccgccattgtcatcatggcccgttctcaatgagctgttgggtacacctcccagacggggtggtggccgggcagaggggctcctcacttcccagtagaggcggccgggcagaggcaccccccacctaccagacggggcggctggccgggcgggggctgaccccccacctccctcccagatggggcggctggccgggcggggggctgacccctacctccctcccggatggggtggctgccgggcggagacgctcctcacttcccagaccgggcggctgccaggcggaggggctcctcacctctcagacggggcggctgccgggcggaggggctcctcacttctcagacggggcggccgggcagagacgctcctcacctcccagacggggcggcggggcagaggcgctccccacatctcagacgatggggggccgggcagagacgctcctcacttcctagatgggatggcggccgggcagagacgctcccaggagaaggggtttaaagaaatcaaaaaagcttgactcaggccccagctttaggactgccggataaactaactaagcctatcttcttgtatgtccacaagtgaaagggaggccataagggttctaactcaagccataagtttatggcatcacccagtgacatacttatccaggcaattagactttgtggcacttggatggcctctttgttttaaagctattaaagcactagctgccactgccctactggtgcaagaagctaataaactgactttagagactgtgaatagcctaaacctggctacattgctcctcatcaagtcagtgccaggagacccctttcatttctgtgtcaacatgatagatgaagttttctcaagccagagagatttgatagcccctcagggaaactggacattaaatattttactgatggaagcagtttcatactaaagttttatgaaagactttgtaaggcattttgattgtgcactccatttaaccctgaggctgctgaaaatcagtgattttcactaaaatcactaaagggagtctgccgagctgggtatgcagtggtgactttggactcagtagtagaggtgcagtctctgcctacagaaacttctgcttagaaagcagagctaatatctctgacaagagctctctggctagcaaaagaccaaaagacaaatatttacacagattccaaatatgcttctgccactttgcatgttcatgaggtgatttacaaagaaaaaagacttttaactgctgaaagtaaagaaataaagtacaaggaagaaattctacagctcttaaatgctgtataggacccaaaagaggtggcagtgatgcactgcaaggggaaccaaaaaaggaagaacactaaaggctaaaaaaataaaaataaaaaagcagacaaagaggcaaagcaggctgcaatgacaactccaccttctaaagaggaagtcttagctatgcttctcttcccagagattcccctcccggagatcccaagctatgctccaagtgaaagggcttgttttgcccagaaaaataagaactacactaaaggaagatggtaaaaattctccagtgggaggctagccataccagaaatggtgacctccagatttgtaaaacaattccaccaaagaactcacataaaaaaaaaaaaacagcactaaagacattattaaggcatcatttctatgcaccatggctcactgctattactcaagccatttgtaaacaaacagtgtttaacttgcactcagaacaatccatgacaaggagggcctactccgcccctgggagttcaggaaacaggagccagggagccgtgccctgtgaaaaactgcttatagacttcacctaattgccctgagagggagggctatcagtacatgttggtgttcatttgcaccttttcaggataagtcaaggccttcctcacccagacagggaaggcactagaggtgaccaaggtgttgttaaaagacattattcccagatttggactgtctctaactctaagatcaaacaatggaccaacatttgtggctgaaatagttcaggactttacttgactattaaaataaagtggaaattacatacagcctacaggccgcagagctcaggtaaagtggagtgcataaaccagacactcaaacagctgctgaagaaattttgtcaaactcatcaaaagtaggatcaggtcttgtctgttgtcctcctccgagtcaggtgcactcccaccaaacaactgggtattcgccctgtaagattttattcagccagccaccccccatcataagtcagattaaaggtaatctctgtaaactagaagaactaactttaagaaggcaaattcaggctttaagtatggccatgcaaaaatgcatggctaggtatagaaaaaaaatgcctataagtcaaacagacccagtacaccctttcaaacctaaggattttgtttaagttaaaaaatggaggcagggtgtggtggctcacgcctgtaatccaagcattttgggaggccaaggcaggtggatcacatggtcaggagatcgagaccatcctggctaacacggtgaaaacccatctctactaaaaatacaaaaaattagcccggcatgatggcgggcccctgtagtcccagctactcaggagtctgaggcaggagaatggcgtgaacccaggaggtggagcttgcagtgagctgagattgcgccactgcactccagcctcggcgacagagcgagactccatctcaaaaaaaaaaaaaaaggaaaaaaaatggaatccaaccacactaggacccatataggataggccccatatcgtgatcatgcctagtcccactgctgttaaagttgcacgtttcacaccttggattcaccatagtcggctgaaaccagtggcagcagtgactcccaacgacgaacagtggattagccaacaagacccagattgccccacccgaatagtcccatggtgaaacccaaccaccggtaagaaggacaactgccctgctctgaccacactggaggctggtcagtctatgcacggctgaagcttgaggatcctgtaagctctgctctagtcacatcctggaagctgactagtctacgcacagccaaagctaaggggacaatctccggataagtaaatgtggatacaatttataagcctagttataattctgtcaatactgattgttctgttgttatgttattactgcaaatactgcaaacgtctatgcccagaggaaggtttgccatgcccatgtgtagtgtaagcatgtttctattacatacactgacgttgttaccatttctgcctatactagaaggggagaaatccctagaagaatgcccacactgtgtacacactacctggataaggaataccctagttaaacctctactgtacgttactgactatgaatgtacaggaacaaagttaggaacctgcacatacaaccggaaacagtctgcaatagtttaacacaagagagacttagcagcaacagtcctaaacatctgtacagaaaaccacaaatcagatgtcgagactgaacattcagtggtctatgctaacacagctccaacacttacattcaggaaggactgctctgctaattagtatgtcaaccaaaccagattgtaagacaagaacatacaatcctttaaattttactatcttaaagccagagctaccttcttggtctacaggacagatgacactattatgagttgatagacaaggagcagaacttggagttccactactaattgtcaaaaagactagaaggactcaaatgtatccaaccccacaattccaggtccataagtcattctataagcattttgatcagtcaatgctgaagcttccccccatcaaccaaaaacttatttgctcaactagctgaaaacatagctggcagcttaggaatttcctcatgctatgtatgtagaagaactaatatggaagaccagtggccatgggaggcaaaggaattaatgccacaagatcccttcacttaacactgccagtgaaccaacagcctcagccagtgtttggttgtcaactacctccataattggaaagtactgtatcacccgatgaggaaaggctttcacagaggcagtgtgagaaacaacctgcctagggcaacagtattgtgatgagactaaaaacaaaactctatggagatccaaaccctttctctcaattctctactctaagccacacttggcatcagctagaggctccaaattcttgaaaggcaccctctggcctatattggatctgtggagcacaggcatatcagcaactgccagctaaatggacaggggcatgtgcgttaggaacaatcaagccatcattctttctaattcctctaaagcaagaggaactcttagggtatccagtttatgataaaaataaaaaaacaactagaagcataataacaaaaagagacacaaatatcaaaaaagatgtggacataggaaactagaaagataataaatggcctcctgaaagaatcattaaatgttatgggccagctacctaggcgcaagatgggtcatggaggtaccgtaccccaatctatatgctcaaccgcatcataaggttgcaggcagtccttgaaattataaccaatgaaacctcaagggcactagatttattggcaatacaagcaacacaaatgaggcatgccatatatcaaaataggctgggtttagattacctattagcctcagaaggaggagtatgtgaaaattttaatttaaccaactgttgcctagaaattgatgataatgaccgagctgtcatggaaatcacagctagaatgcacgagttcacctatgttccagttcaaacttgatctgggtggtccctggattccttgtttggaggatggttctcaaccttaaaaaaaaaaaaattaaaaccctcattggtgggttcttgcttatttttggcatctgcctcatcctcccttgccttttacctctgtttattaggagtattcagtcaactatagaggcaatagtaaccaaaaaaactaccgtgcagttgatggcattaacaagattatcagccactgccagtagaagaagaagcacagccctgtgaagaggtgacagatagtggtgctttctgttaacatctttgttataaaaagcaccaaagggaggaatggaacaggaataaaaagaaattaaagaatgtgtaaacagaaactcggttgtatgtatgagaaagagaaagagctggagtcctttaaaaattaactgcctgtttttctgtggctagtgagccttatctcttctttcccaggcattgtgaagactctgtttctctagctgtgcagctgcaagatcactagacagatcaactcaagtcataaaacatgtttttccttgaaaagtaagaaatgatgtaatgcatgtttcaattaattgaataactctctttgtttctcacttctgtaatatgcttccccctgcacagatctccccctgccccacaaaatgcttaaaaggtgacttagctctttgttcagggctcagtcctttggatgtaaatctgactgggtcggtgcacctaaataataaatatcctcctcaatccctcagtatctctgattccttaaaatatcccactacagaactcctgatctcaggtgatctgcctgcctcaacctccaaaagtgctgggattacaggcatgagccattgcatgtggcctaaaaaataatttctttaaaatggtatactctgcatcaacattgacacaaaagcttctgttaaactctgacacccactcagatgtcacctcctctataaaaccctccttgatttccctcactgctatctcagggggagaattaatcactactaccatttggctgcctcaataccttatatctttttatgtacaagcattattctccagaataaattaatcatttatgcatctatccacactaatggactataaatggggcagatatgttgaaccctactcatttatgtaatccaaatatctgatacataataggtgttatatatgtatacacatggaatcaaaatgctctcagggaattattggaaaagctaccaaattctttttattttttaattttttttaagttcttttaagttcaggggtacatgtgtaggtttcttacataggtaaatatgtgtcatgggagtttgttgtgcagattatttcatcatccaggtattaagcctagtacccattagttgttttttctgatcctctctctcctcctaataggccctagtatgtgttgttccactctatttgtccatgtgttcgcaccattcaactcctacttataagtgggaatatgtagtatttagttttctgttcctgtgttaatttgctaaggataatggccccctgctccatccacgttcttgcaaaggacatgacctcattttttatggctgcatagtattccatggtgtatatgtaccacattttctttatccagtctatcattgatgggcatttaggttgattccatgtctttaatattgtgaattgtgctgcaatgaacatacacatgcatgtctttataacagaagaatctatatttctttggctatatacccaataacaagattgctgggtcaaatggtatttgtctttaggtctttgaggaatcaccatactgtcttccacagttgttgaactaatttacactccctccaacagtgtataagtgttcctttgagaaaaacaaaaatctcaatgttctaagaggttagttttttaggcaaatggtataccaagagactgtcctcaggcccaggccatccagctgctcctctgagaggctacactcttattcctcagactgtcctctaagagatgacccaggggatgatattcattagacactccaagagatatggccattatgggcatcttgggttatcccagacagttctaatactcatgaacaagaaaagaccggagggctgctgtaaagagccctgtaatttctccaaagcaaaactgcaacccaaagacatactaataaggtgtgtgtgcctagggaagataaaaggaagagaggcacacagattttttttttttacagtgaagtgtcagaggattattttctacttttcttttctacatttgagaatgtaggaatgaaagtggaaatgtataattttactgcaagcctgagttaggctaggggaaaagagtggtggattagaggccctgattgccatacattaggaagacacagaagaaaaccagtcctgctctccctctccctctccctctctctccacggtctccctctgacgcccagccgaggctggactgtgctgccgccatctcggctcactgcaacctccctggctgattctcctgcctcagcctgcggagtgcctgggattgcaggcgcgcgccgccacacctgactggtttttgtattttttggtggagacagggtttcgccgtgttggccggactggtctgcagctcctgaccacgagtgatctgctagcctcggcctcccgaggtgccgggattgcagacggagtctcgctcacttagtgctcaatgttgcccaggctggagtgcagtggcgtgatctcggctcgctacaacctccacctcccagccgcctgccttggcctcccaaagtgccgagattgcagcttctgcctggccgccatcccgtctgggaagtgaggagcatctctgcctggccgcccatcatctgggatgtgaggagcccctctgcccggccacccagtctggaaagttaggagtgcctcttcccggctgccatcccatctgggaagtgaggagcgtctctgcccggccgcccatcgtctgagatgtggggagcacctctgccccgccgccccatctgggatgtgaggagcacctctgccctgccacccgtctgagaagtgaagagcccctccgcccggcagccgccccatctgggaagtgaggagcccctccggccggccgccaccccgtctgggaggtgtacccaacagctcattgagaacaggccatgatgatgatggcggttttgtcgaatagaaaaagggagaaatgtggggaaaagaaagagaaatcagattgttacggtgtctgtgtagaaagaagtagacataggagactccattttgttctgtactaagaaaaattcttctgccttgggatgctgttgatctatgaccttacccccaaccccgtgctctctgaaacatgtgctgtgtccactcagggttaaatggattaagggcggtgcaagatgtgctttgttaaacagatgcttgaaggcagcatgctccttgagagtcatcaccactccctaatctcaagtacccagggacactaacactgcggaaggccgcagggtcctctgcctaggaaaagcagagacccttgttcacatgtttatctgctgaccttccctccactattgtcctatggccctgccaaatcccccaagaatgatcaataaatactaaaaaaaaaaaaaaaaaaaaaaaaccagtccttctgtggagtgttaaaaatcattaaagagcacgaacttagactgaagtggctctagtgccctgtgttcattggtaaaaaatctaaaacctaactcaaatgcatgtcttataaattactcttaggcagaaacaaaattcaggcttatccaatcataaacctgcaattaacctgattacataaccaggaaatttctacctggatcatacaaataaggtgacaacataactgtaaccaattattgaatctggtttgccttctgacacactttataaaacccttttctttttttttttgagacggagtctcgctctgtcgcccaggctggagtgcagtggcgggatctcggctcactgcaagctccgcctcccgggttcacgccattctcctgcctcagcctcccaagtagctgggactacaggcgcccgccactatgcccggctaattttttgtatttttagtagagatggggtttcaccgttttagccgggatggtctcgatctcctgacctcgtgatccgcctgcctcggcctcccaaagtgctgggattacaggcgtgagccaccgcgcccggcctaaaacccttttctttatgcccctcaggtggacctcaaatcatggctgggtgctttccatttcaccaatcactgtttgctcaaataaacttgttaacgttttaacattgactccctttaatttttaacaggagagactgagcatggtggctcatgcctgtaatcccagcactttgggagaccaaggcgggtggatcacctgaggttgggagttcgagaccagtctgagcaaccttgagaatccccatctctagtaaaaatacaaaattagccgggcgtggtgctgcatgcctgtaatcccagctactcgggaagcggagacaggagaatcgcttgatcccaggaggcgcatgttgcagtgagccgagatcgcgccattgcactccagcttgggcaataagagtgaaactccgtctcaaaaaaaaaaaaagttaatatgcagaaacagtgttaatcaataggacagccctcagacatggtttgtggtttgggggctaccagcgggtcttgaagaaaaggctcctataaggtgtatgagaaagcaaagcaaattaaatagctgattggatacagttaggtagtcgcttcatttggagtgtccaggagaagattttctggttatgtaatcagggattaattggagatttatggttgattaagtctgaattttgttttctcctaaggtagtaacttacacaaaatgcatttgagttagattttttttgttgttgttacataggcacctagaccactagagccattccagtctaattacctgctatctaattattttaactttattcaggggctctggtgtccccctacattttccaaatgtgtggcaagcaggtcctcaaatccactactctgttctgccagcctaacttggcttgcagcaaaatcttattttttatttttatttttatttgagatggagtttcgctcttgttgcccagactggagtgcaatggctcaatctcggctcaccacaacctccgcctcccggattcaagcgattcttctgccttaacctcccgaatagctgggatcacaggcatgcggcaccatgcctggctaattttgtattcttagtagagatggggtttctccatgttggtcaggctggtctggaacaaccgacctcaggtgatccgcccatctgggtcccccaaagtgttgggattacaggcatgagacactgcgccaggccagtaaaatcttaaatttccagtttctttcaaatatttcccagagccaactcctcccctccaattcacaacattatcaactatttttgtcctttattttacattttagaaacagcattttaattaatcacttattcacagagctgtggatggcactctttaaaatacttgttttctttcctttttttttttttttttttttttttgaaatggagtctctcactgtcacctgggctgaagtgcagcagcacgatgcgatcttggctcactgcaacctctgcttcccgggttcaagtcattctcctgcctccgcctcatgagtagctgggattacaggcacctgccaccacgcccagctaattttttgtatttttagtagagacaggtttcactctgttggccaggctggtctctaacacctgaccttttaatccacctgcctcggcctcccaataaaatagttgttttctatttgtaaattttttcatgagaggaaagcataaaatcatccccttacactccactgtcaaaaatctttctgccttttctccttttatcttccctaggcacaaatgccttatcaggacatcgttggattgaggtttccctttgaaaacttgatggggccatgtgtcctcagccacactctgatctctttctagtcttgagttttagaactgtcttgggatggcccaagatacacacaacagccatgccttttggaagctttggtgacgaccagccccttcgtcttctccttccagaggacaccctgacatatgggaatgtagcttctcaggagagcaactgaatgccctggggctcagataaatatcctggcttacccttcccataaaaacagaaccttttgggattttaagattttcttttcccaattccagttcttgctggttagccaatcagatggtggtatttagagaaaaaggcagaaatcatgtctgtcctcagaatagtgtcatatttgtgaagggagaaaaactatgctgaaagacgaaatagacctaccccatggaggcaatgcaagaacctgcaaagcaaaaaagtaccagggacacagagtggggtacagtgcagtgtcttctgggagggtgatctttgagcacttcggtgagtagggtaagggtgggagaatgtcccaagtgatagggttgcctgatttgacacttgagtcagatatgtgtctgttgcaataaacactattactccctgagtttgccaccttgaacagatttgttcacttatttcaactttggttttttattagatgtaaattgaattttatcatcagagctcaaaaggcaaaaaacatacttacaaagggcatgaaagaggttaatttcagaaaaaattaaatatttggtcatatgttttacttagtagaaattcttatttacttctttctccaccagagtgagtgcagttaaatttctttggtctgtcctttttggggcatgattacattagtttctcttttttgcaagctgcagaatttttaatattttgaatctcttttctgtatcttgtcacctgaatgtgtgagtctgatgctaaattttgttttttgttgttttgagacagagtcccactcagttgcccaggctggagtgcagtggtgcgatcttggctcactgcaacctctccctcccaggcttaagctgttctcctgcctcagcctcccgagtagctgggattacaggtgcccaccaccatgcctgactaatttttgtatttttagtagagacggggttttaccatgttggccaggctggtcttgaactcctgacctcaggtgatgcacctgtcttgccctcacaaagtgctgggattacaggcgtgagccaccatgcctggctgaagctaaattttataagatggtacttggcatcttctagaagtatttacatattattaacttaattatttattaaattttgtttttcaagatggagtctcactctgtcacccaagttggagtgcagtggtgtcatctcagctcactgcagcctccacctccagcgttcaagaggttctcctgtctcagcctcccaagtagctgggattacaggcatgtaccaccacgcctagctaattttttttttttgagacaaagtcttgctctgtcacccaggctagggtgtattggcgcaatctcagctcactgcaagctccgcctcccagtttcacaccattctcctgcctcagcctcccaagtagctgggactacaagtgcccaccaccacacccggctaatttttttgtatttttagtagagatggggtttcaccatgttagccaggatggtcttgatctgacctcatgatctgcctgccttggcctcccaaagtgctaggattacaggcatgaggcactgcacctggtccttttttttttttttttttttttgaggagtctcactctgaaacccaggctggagtgcagtggcagaatcttggctcactgcaacctccacccccctggttcaagcaattcccctgcctcagcctcccaagtaactgggattatagacacatgccaccacatctagctagaattcctgattaaagttaaaataattagataacagctaattagactgatgtggctctagtggtctaggtttctgtgtaacaaaaaaaaaaactaactcaaatgcattttttgtaagttactaccttagaagaaaacaaaattcaggcttaattaaacataaatttccatttaatccctgattatgttaccagaaagttttctcctggacactccaaatgaagcgactacctaactgtacccaatcatttatttaatttgcattccatcctcatacacattatagaatccttttcttcaagaccctctggtagcccctgaaggggtggcctgcccctccacacctgtgggtatttctagtcaggtgggactgagaaaagaaataagatacaaagtatagagaaacaacagtggacccaggggaccggcgctcagcataccaaggacctgcaccagcactggtctctgagttccctcagtttttattgattattattttcattatttcagcaaaaatgaatgtagtaggagagcagggtgatgataaggagaaggtcagcaaaaaacatgtgagcaaaagaatctatgtcataattaagttcaaggggaggtactatgcctgcatgtgcacgtaggccagatttatgtttctctccacccaaacatctcagcggagtaaagaataacaaagcagcattgctgtaaacatgtcttgcttcccaccatagggcggtttttctcctatcccagaatagaacaaatgtacaatcgggttttatactgagacattcagttccccggggcaggcaggagacagtggccttcctttatctcaactgcaagaggctttcctcttttactaatccacctcagcacagactctttacgggggtcagactgggggatggtcaggtctttctcatcccatgaggccatatttcagactatcacatagggagaaaccttggacaataccccactttcaagagcagaggtccctgcggctttctgcagtgcattgtgcccctggtttattgagactagagaatagtgatgacttttaccaagtatactgcttgtaaacattttgttaacaaggcacttcctgcatagtcctagatcccttaaaccttgatttcatacaacacatgtttttgtgagctccaggttgggtcaaagtggctggggcaaagtggctggggcaaagctacaaattaacaacatctcagcaaagcaattattcaaagtacaggtctttttcaaaatggagtcccttatgtcttccctttctacatagacacagtaacagtctgatctctctttcttttccctatagcccccaaaccacaaactatgtctgggggctgtcctattgattaatcatggtttgtacatattaactttttttttttttgagacggagttttgctcttgctgcccaggctggagtgcaatggcacaatcttggctcaccgcaacctgaacctcctgggttcaagtgattctcctgcttccgcctcctgagtagctgggattacaggcaggcatcaccacgcctggctaattttgtattttcagtagagatgaggtttatccatgttgctcaggctggtctcgaactcctgacctcaggtaatccacctgccttggcctcccaacatgctgggattacaggtgtgagccatgccacctggccttaaatattttttatagaaataattaaatgacagattgtgggggattagtcaaaatggggggagaaattatagggaaaggagcaggccttttgaaaggtcagaaggctctgcaaaactttgtgggagaataagctgatggcagccgttctcttaccctgaggcagagggtgaggagtaggtacaagggaatgtaggggaatttatcttaaataggcttgtttgctcgtgttgtccagaagctgacctttgatcatccgtgctcttgactgctctctgaaagggggaacaataatgttaattacctgcagattgtgtttgctccaggctttccgtattatgtctgtactgaataaaagcaagcagctccagctgttcggggctgctctcgtctttgaccacaagtgctggccagtcctctagctgctcttacactgcatacctgtgtctgagtactcctttcattcatcaattggccagggtctatgggacagacctggcagctggtgccccatgtgaacaaagctgcaatggaaccctcaaaaacaaaggtgaagagactgtgcagtaagtaatcagtgcccattcaggatttccaagtttgaggggattttcaagctagggtttcatcatgggacaacagttatcagctcaacagcaacagcatataaaagtattgaaacagctgcttcaagctagtggagcctcagttttggaagcccaattaagggacctaatgcaaagtgttgtttttcataacccatggttcccagaggaaggcacactagacctagagctctgggaacaagtggggagaaaacttagatgacatcatgcgcaagggcaacaggtcccagtaacatctttaatgttagggggctttgttatggctgctttggccccgctctacacagaagtgcctaaaaagggaagggaggaagaaccatcatctaccttaccacctcctcctcctcccccagccctgctgttaccaggtaaaggtgccacagaggagacagagattttccctgtgccccctcccccagtaaattggaaaaaagacaagggatacactacagttatgggaccctgtcttaggcaagcagcattagaaggggagctcttggcatgcccggtgatgcaagatcaacaaggcaattgggtacatgaacccattacttttaacacctataaagatgccacagcagccaacttccatatgaccccatgagactggccactactagctaaaacaactttagaagccagtcaatatctcctctggaaggcagaatatgatgagttgtactaacaacaagccaaccagaatcagttggctgggcaaaacataacggccgctatgctccaggggaggggtccctatgtcaatgtacaagaacaattaattttgttccccaggcctatgcacaagtgtctttgtgtgctcgcagggcttgggactgaattcctgaagatggagttcaacagggatcttttgtgaatgttcaacaagggcctaaggagccatttgttatcagtcggttaacacaggcaattaagagacaaattagtcacgcccaggctgctgaaatcttattgttgcaattggcttatgaaaatgctaatgtagactgccagcaggcaatgcaggctattgtattaaagcctcctaaagtgaaaagggagaaaaacccaaattgttttctatgcggagagccaggtcatgtgaagtgggaatgccccaatagtaaagaccaaagtaactcaggaaaaaaaaaaaaaaaacccttctacatgcccccgatgtaaaaaggggaaacactgggcaaatcaatgcaagtccaaatttgataaaaatgtcaaccccctaagcaatcaggtgggacatttcatgaggggctggccccaggccccattccacactggggcaatgccagtggctttcctcggttagatggaaagcccacagtcctctctttcagagcagccaccttggggagcgcaggactggacttactctgccctgacaaattagtgctaaaagaaggagaacaccctaaagggttgcaacagggatctggggtccactgcctctgggaacagtgggactggtcctagtgcgatgaaacctatccagtaaaggagtcaatgtgctcactggggtaattgatagtgattaccaagatgagatattaattatgatttaatgtaaaggtctacatattcttccccctaaatctaaaatagctcagttactactcttaccatactgggttcccaatgcccagggaaaggaaaggggacaaggaggttttggaaacacggaagccacaggagtatattggaaccaatcaatcactgatcagagactcatgattaccttaaaaattgaaaataaaaattttactggcctattggacacagggtgaacattttgatcatcagtgatgaaaactggccagaaacttggccttgggtcactcagaaacaaaaaattgtcatcatcagggaagtgcacacagccaagcagagcacacaccccttaatatgtcatgattcagagagaaggaaagcagttatacaacctcaaatcatgcccatcccagttaatatttgtggatgggacctattagcccaatggggggttactctgcagacctctttctaataatggccactgttgttattcctcccctacccctgacgtggctctctcaagatccaatttaggtagaacagtggcctttgaagggagagaaattacaatgagcccataaattagttgaggagccattaaaagctggccatttagaaccatcagacagcccttggaattcacctattttcgtcattcccaaaaagtctggtaaatggaaacttgtgcatgacttatgtgctatcaatgctaatttgtaacctgtggggccccttcaacaggggctccctttccccacggtgattcctcaagattggcctatattcattattgacttaaaagactgcttttatattatttcccttgcagaacaggaaagagaaaaatttgcatttacaataccagctataaataatgaaaggccagctcctccaattcattggaaagtacttcctcaaggaatgctaaacagtcctaccgtgtgtcagtatcatgtaaatcaggctttgcttcccagtagaaaagaatttcctaattgcaatatcatctggatgacatcttactggtggccccaatggagccaatacttttgagtttatatgcccctgtcaaaaggaatacacagttaagaggtttaatcatagcacctgaaaaggtacagatgtcctccccttggaaatatcttagatacatactaacttcccggtcagtaagacctcaaaatgttaaatactagcaacttatataccttaaatgattatcaaaaattactaggcaatattacctggcttcaccccaccttggacataactactgataagttgcagaacctgttttctatcctaaagggcaatgaaaccctggacacccccaggtatttaacctccactgcaaatagggtaattgaggaaatagagcaagctatttctcataggaaactagattgcatagacccacaatattcagtccagttgtttgtttctcctacaaaacattccccaacaggattaataggacagatggccccagggctgtgcttcctagaatgggtttttgctcacacactgggactaaaacactgtccccctatatccagctaattggtaaagtcatttatacaggccacagatgatgcaatcgattgcaaggttatgactctgatgtcataagaatacccttaagtaaaaaacaattcgaaggagtcctgcccttatctctagattttttcttttttttgagacacagtcttgctctatcacctaggctggagtgcagtggtgcgatctcagctcactgaaagctgcaagctctgcctcctgggttcacgccattctcctgcctcagcctccctgagtacctaggactacaggggaccaccatcacacccggctaattttttttgtatttttagtagagatgggctttcactgtgttagccaggatggtctcaatctcctgacctcgtgatctgcctgccttggcctcccaaagtgttgggattacaggcatgagccaccgcacccgaccttatctctagttctttaaatagcactctctgattatgtgggccatatagaaagtacccttcccgctgatgaactactctagctcttatactcctgtaattatgcctacaaaggtagttcactcccccatacctaatgtgctttaacagttttcactgatggctctggtaaaaatggaaaagcagctatctggtgggaaccgcataacttcctcactcgatctagatttactagtactcagctaaagttggagccctagtattggtcctggaaaccttttccactcagcccatcaatattgttaatgactctgcttactccatttatttattgcaaaaccttgaaacagtcctcattaagtcaactcttgagcccactctgtgtgccctttttctttgacttaagaaattgctacattaacaaacacatcctgtttttatcacacacatttgggcccaaagcttgctgcccagcccactagttcatgacagcaatcaagcagacctgcaggttatgacgtcacttgcttgaccaagccacccaatcacaccaatttttccaccaaaactggagaaacttaactaaacaatttcaatttacccaaagactagataaacaaattatcctgcaatgcccagattgccagctcacaggcacatcccctccttcaacagatgttaaccttagaggactagaacctaatcagcatggcaaacagatgttacacatgtccctgaatttggaaaactaagatatgtacatgtatccattgatacctattcccacctaattagcgctcatgttcttcctggagagtccatccaatatgtcattaaacatcttctcttaacttttgcatttatgaggtggcccccaaaaaattaaaactgataatggtccggcttatgccagctcacagtttcaccaattttgtcacacatggaacatcctacattccaagacatcccatataacccccaaggacaggctataataaaaagtgtccactctgcccttaaatatgctcagaaaacaaaaaaggggaaatatgagtaaggaccctgcaacacttttggcacaagccttatttaccctgagtttcttaaatttagatgataaatttcaatcagctatagacaagcaccttgcaaaaatcactcaagatataaaaccttcagttttatggaaagatgtaaatagtaatgtatggtgtggtccagatgatttgctaacatggggaagagggtatgctcgtgttcacaccccctcaggtcctctttggattccagcacgaggcatcagaccttaccatggcttggctaggacccaactcggtatcagaaatgaaggaaatgacactgcaggacctaacagccctggacgatgtggcttcctaggacaacacagaccccggacattatgctgaagaagataacttaggaggctgagtgaatcctggtccagacacagacacattcactccagataatttgttccttgctatgctttctgttgtacattgcaactcttgtagggtattaaccttttttattctctcactttgcctgctactgttggaggccaaaggaatgagggttgtgaccaactcagtataccactggaggctatatgagcaaacagcaaactgttcttgttaggagccaaaagcctgacggttgtgaccaactcagcatcccactggaggctatacgattaaagagcaaactgtttatcatgaatgcaggatgtgggcaaactcacatctgtgcctgccaccagaagatatgctgagggcagtcactccctggcactgtgctccttgcagttgtctactggaacatctggagtctactgttcaaagaaagcattcgtgcaggcctgcactaaatcaagcagctgattgacaaccacccctttctccctatttcctttacttaataaatacaaagggctctagaagctcaggggccttgctccctagaagcaaggagccccctgaccccttcttgaaaacatactctagtgtctttttctttattcccgtgttcgtcctctgttccattttccaggctccatgacaagtggcaccaacaacagggacttcaaggacgtgacgaagaaggtctgctagagcagaggaagtgaaatttaccagatgaaccgggaccccaggacgagtctgtcagcagggaatataaggccagtgctctaaagaagtactgaggatgggaagtctctgaatcagggtaacatggggtagaatttgtctgttgaagaaaaacattatgtgcagttgtttaaagttttattgaacacagtctggagctcaagttaattcacagacattaactaagcttctgcaggaggttattacacataacccatggtttctgcaggcaggcactctcaatgtggaaaattgggacagagtaggagacaaattgaaatgggctcatcaaaaaggtcccaaagtagacccttctgttttttcctcttggggttttgttcacacggtcctacagctgttgtctccttcttattctgtcacacaacaggagccaggttctgagtctcaagatttaaaaaaattatttgttcctccaactgggcctattgaaaacaatgagcaggagaaaggagaggagaattggccccttgctaagcaggaaacaggagaggagaattggccgctgccacaccctccaataacagaagtagaaacccccatacaaaaaattttgtgcactgctgctgtggctagggaacctttaggaacttgcacttttcctattaccataaggcctgacctgaatgatccgcaaaatcttttaaatgaacacactcctgtagagtttaaattactaaaagaattaaaagctagtgtggtcaataatggagtgcaggcccgggcacggtggctcacgcctgtaatcccagcactttgggaggctgaggcaggtggatcatgaggtcaggagattgagaccatgctggctaacatggtgaaactccatctctactaaaaatacaaaaaaaattagccaggtgtagtggtgggcccctgcagtcccagctactcaggaggctgaggcaggagaatggcataaacccaggaggtggagcttgcagtgagccaagatcacaccactgcactccattctgggtgacagagcaagactctgtctcaaaaaaaaaaaaattatcttgggctaccctctttgtgtcccctccctttgtatgggagctctgttttctttctttctttctttctttctttctttctttctttctttctttctttctttctttctttcttttttgagatgtagtttcactctttttgcccaggctggagtgcaatggcatgatcttggctcactgcaacctccacctcctgggttcaagggattctcctgcttcagcctcccgagtagctgggatgacaggcatgcaccaccatgtctgactaattttgcattttttagtagagacagggtttctccatgttggccaggctggtctcgaactccctacctcaggtgatccacctgctttggcctcccaaagtgctgggattacaggtgtgagccactgagcctggcctgggagctctgttttcactctattaaatcttacaactgcactctcttctggtctatgtttgttacagctcgagctgagcttttgattgctgtccaccactgctatttgccgccattgcagacctgccactgactttcatccctccagatccagcaaggtgtccactgtgctcctgatccagcaaggcacccattgctgctcctaatcaggctaaaggcttgccattgttcctgcatggctaagttcctgggttcattctaatcaagctgaacagtagtcactgggttccatggttctcttccatgacccatggcttccaatagaactataacactcacctcatggcccaagattccattccttggaatccgtgaagccaagaaccccaggtcagagaacataaggcttgctaccatcttggaagtggcctgctgccattttggaagtggcctgccaccatcttgggagctctgggagcaaggacccccccccccccggcaacattttggtgaccatgaagcgacctccaaagtggtgagtaacattggaccacttccgcttgctattctgtcctatccttccttagaattggaggaaaatactgggcacctgtcagctggttaaaaacaattagcgtggccaagggacttaagactcaggtgtgaggctgtctgggaagggctttctaacaacccccaacccttctgggttgggaatgttggcctgcctggaaccagcttccactttcaattttcttggggaagctgagggccaactagaggcagaaagctgtcatcccgaagtcctggcattagccagttgagattatggcacagccagaagtctctactcaacagtcacccatgtgtgtgcccccacctttccttctgacccataactcctgggtcctgagcatgactttcttgaaaatatagccccaaaattctccttacctctgaatctacttcctctgatctctgcctcctaggtactaatggttcagattttcatttcctctagcaagttgtatctccaaagggatctaaggaaactctatgctgcatccttaggtatctaggctataaacccagggagtcttgtccctggtgcccctcctgatttaggtatacagctttcaacatgggcagttatgtgggacctgttccctaccaccctggcaagggccccaactttgtaaatggctaagagaagagagacagagagagagagacacacacacagagagagagagagagacagagagagaaacagacagagaaagagagacagacagagaggagagaggaaagagaggcagagagacaaagagggagtcaaagagagaaagaaagagaaagatagaagtagaaaaaaaaagtgtgccctcttcctttaaaagccagggtaaattaaaaacctatagttgagaaatgaaggtcttatccatgaccctataacactccaatactaccctgttgtcactgtaaacaagggcgtagcctgaaaacactgagaccactgaccacccgtagccttcttatcaaaaatccttaacccagagaccgactgatggcccaagtgcattcaatctatagtggcaactgctttcgtagcagtagaaagtagaaaagtaacttttagaggaaaactcattgtgagcacacctcaccagttcagaattagtttaaggcaaacaagaaaaaagtagcttactaactcaaaaagtcttaaaatacggggttattctgttagaaaaaggtaatttaacactaaccactgataattcccttaacccagcagatttcctcacaggggatttaaatcttaattactatacaaaggtccaaccagacctaagaggaaatcccttcaggagaggatgatagatggttcctcccaggtgattgagaaaaaaataaaaaagggtattcagtaattgatacggaggctcctgtggaagcagagttggaaaaattgcctaataattggtctgctcaaatgcacgagctgtttgcactcagccaggccttaaagtacttacagaatcaaaaaagactatttcaatcctgactcaaagggctacctacaccctctctgaaatgaatttgcataagaacggttgtttatgggaatgcatcttgatggggcagctgggttgttatgaaatacttaggaacccagcccaggtctagtactcacccctgagcacaaaaacaatgttgggcaatttggtaaaggaccactagaatccagcagcctggacccctttctttgtggtcaagagaggtgggaaaagaggtgcaggactgctacatcagtgaacataactaatctgataagcagaggcctatgggtggttatgcaccctggaaaggaataagcattaagaacatagaggccgctctatgactaatgcttattggaaaatgaccaggggtgctggcatccctatgttcttttttcagatgggaaatgttccccccaaggcaaaaatgtccctaagatatattctggagaattggggccaattgaccctcagacactaagaaagaaatgacttatattcttctgcagtacaacctcaccatgatatcctcttcaaggggaaaaaacctggcctcctgagggaagtataaactataacaccatcttacagctagacctcttttgtaaaaaggaaggcaaatggagtgaagtgccatatgtgcaaactttcttttcattaagggacaacttgtgattatgtaaaaagtacaattatgtaaaaagccctacaggaagccctcagagtctatctccctaccccagtgtccccccgactccttccccaactaataaggacaccccttcaaccctaatggtccaaaaggagatatacaaaggggtaaacaatgagtcaaagagtgccaatattcccccattatgtccactccaagcagtgggaggaggagaatttggcccagccagtgtgtgtatacctttttctctctcagacttaaaacaagttaaaatagacctaggtaaattctcagataaccctgatggctatattgatgttttacaagggttaggacaagcctaacatctgacatggagagatataatgttactgctatatcagacactaaccacaaatgaaagaagtgccaccattactgcagcgtgagagcttggtgatctctggtatcttagtcaggtcaatgataggatgacaacagaggaaagagaatgattccccacaggccagcaggcagttcgcagtgcagaccctcattgggacatagaatcagaacatggagattggtgccacagacatttgctaacttgcatgctagaaggactaagaaaaactaggaaaaagcctatgaattattcaatgatgtccagtataacacagggaaaggaagaaaatcctactgcctttctggagagattaagggagacatggagaaagcatccctctctgtcacctgactctattgaaggccaactaatcttaaaggataagtttatcactcagtcagctgcagacattagaaaaaaacttcaaaagtccaccttgggcccgagcaaaacttagaaaccctattgaacttggcaacctcagttttttataatagagatcaggagagcagacagaatgggacaaacagaattacaaaaaaaaggccaccactttagtcatggccctcaagcaagcagactttggaggctctggaagagagaaaacctgggcaaatcaaatgcctaatagggcttgcttccagtgaggtctacaaggacactaaaaaagattatccaagtagaaataagccaacccctcatccatgccccttatgtcaagggaatcactggaaggccaactgccccaagggatgaaggtcctctgagtcagaagccactaaccagatgatccagcagcaggacggagtgttcctggggcaagtgccagcccatgccatcaccctcacagagccccaggtatgcttgaccattgagggccaggaggttaactgtctcctggacactggcacagccttctcagtcttactctcctgtcctggacaactgtcctccagatctgtcactatcagaggggtcctaggacagccagtcactagaaacttctcccagccactaagttgtgactggggaaatttactcttttcacatgcttttctaattatgcataaaagccccactcccttgttagggagagacattctagcaaaagcaagggcaattatacacctgaacataggagaaggaacacccatttgttgtcccctacttgaggaaggaataatcctgaagtctgggcaacagaaggacaatatggatgaacaaagaatgcccatcctgttcaagttaaactaaaggattccacctcttttccctaccaaaggcagtacccccttaaacccgaggcccaacaacaactccaaaagattgttaaggacctaaaagcccaaccatgcaatagcccctacaatactccaattttaggagtacagaaacccaacagacagtggaggttagtgcaagatcaacttcactccctagcagcagtagtccttcaaaatcaaagagctttagacttgctaaccaccgaaagagggggaatttgtttatttttaggggaacaatgctgttattatgttaatcaatccagaattgtcaccaagaaagttaaagaaatttgagatcaaatataatgtagagcagaggagcttcaaaacactggacctggggcctcctcagccaatggatgccctggattctccccttcttaggacctctagcagctataatattgttactcctctttggattctgtatctttaacctccttgttaagtttgtctcctccagaatcgaagctgtaaagctacaaatggttcttcaaatggagccccagatacagtccaaagttgatgacatcgaaggcactcctctcaaggaaatctcaactgcaagacccctactacaccccaattcagcaggaagcagttagagtggtcatcagccaatctccccaacagcacttgggttttcctgttgagagggggcactgagagacagaactagctggatttcctaggccaactaagaatccctaagcctagctgggaaggtgaccgcatccacctttaaacacagggcttgcaacttagctcacatctgaccaatcaggtagtaaagagagctcactaaaatgctaattaggcaaaaacaggaggtaaagacatagccaatcatctattgcttgagagcacagcgggagggacaatggtcaggatataaacccaggcattcgagctggtgactgctaccttctttgggtcctctccctttgtataggagctctgttttcactctattaaatcttgcaactgcaaaaaaaaaaaaaaaaaaaaagaaaaaaacaaaaacaaaacaaaaacagaaaaaaaaaattatctccaaaatatcatttactcccaaagaatgaactgcttcagttaagtcttcatctgttgtccaccatgttagatttccaacatataatgcaattctctttccagtatgtgtatagacaacattaggtgccactcctttacccatatcatcaccaacagttggtgggagagtatccatgtaatcccagtcttctgtggcatctccattatttgcagatggagatatgacacagtcatacaaatctatctggccatacccacgatattcagcttcctggtttaactcttcacccacatctcgtaaatgtctatgtggtccacgctgtctgccatcttccctcagcctcggccactgctgctgccgccaccaaataagtacatttttgatggtgacagagtaatatcaatgtctaaagttttggtctatctctcaaaattgagaagttgaccaaaagggagaaattgttaaattaattatgcctaaagctgccccctttcctgtttaactttggtcactaggttttttatacatagtaaactgaaatctaactgggtatataaatagaccaaccaattattgtacaaacctctgtgtttttgccaataaaagaacatcaagtgttcaaatcatgattaaataaggcaaatcccaacctgtaatcaatctggctgtttctgtatctcactttcattttctgtatgtcactttgcttttgctgtttataaatctattttcatcatgtggctgtgttagattctctctgagcctactctggatccacagcctacccaatttgcaaatcattccatgctcaattgatctctgttgctcacgtctgggagcactttggggggctgaggcaggtggatcacgaggtcaggaattcaagagcagcctgaccaacatggtggaaccctgtgtctactaaaactacaaaaatcagctgggtatggtggcgcatgcccataatccaggtactcaggaggctaaggcaagagaatcgcttgaactggggagacagaggttgccgtgagacaagatcacaccactgcactccagcctgggtgacaaagcaagactccatctttaaaaaaaaaaattaatgtatctaaaggttttttcttttaaaagatttcaaatattttctatgatgaaaactaataatgtgccattggactttgattttctaaactcatccctcagctatttctccaaattattttatgtctttacaaaatgcttctccagtttctttctttccttccttccctccttccctccctccctcccttctttctctctttctttcttttccttccttccttctttctttccttcttttgacagggactcactctgtcatccagtcttgattgcagtggtgtaactactcatagctcactgcagacttgaccttccaggtttaagctatcctcctgcctctgccacctaagtagctgggactataggcatgcaccaccatgggtggctaatttcttcatttttgtcatggaaacagaatcttactatgttgttcaggcagcactggaactcctgagctcacatcatctcccatctcatcctcccaaagtgctaaaaatacaggtgagagccaccatgtgcttctgcaatttttgtgaggattattcccaatgataaaaagtactctatgagcacaaatctaaaaggaatctgacttcttctgtagaagtgtcactctccaggatttcaagagtctagggcagggcagctactttagtagtgtgatctatggaggtgtatgggctttggagtcagataaagttgatcctgagtctcagcccagccacttagtagctgtaggtctgcacaagtttcttgatgtggaagagttctatataccacatatgtaaaaaaggtagaatattacaaattgtaaaatgattgcaaaatgacaacattttttcatcctacttgtatctatgcccatagccaggtgcttttacagctgtttccttaagatctggaatctgttttcaaaaccctatatctggctgcccttatttgctcaggtcagtagaaacctgtgaacatgacagtgggccagtttggggcccaggctcaaatggtattgactgcttctatttttcttttagaatgctgccatctccatgaataatgcccatgttagccagctggaaaataagataccatgaggaggagaagcaaggtgccgctgttgacaggcccagaagaagaaactcacccccagaagcagagctgtctagtcaacaagcagctgatgatacatgtctgaaggagctcagctgagactggaagaatggccccactcagctcggcctaaatggctgatcatttcaattatgaactaataagttttggatgatttgttatgctgcaatagctaactaatacatgcacccagtacagataggttgccaggattcagagacaggttgactaccagttggcttctaacagtggacaccctctaggtactgatttcttcccctgatttaaagtttgatgttttgtgagagaatttgggtaatgcagaaatacctgtagacatgtatgcatgtgattggtgcttagactcacatagtcccccacaccacaggagaaaacagataaatacagcctgaccattagggccaagaccaaatagcaaaatatgtttgcttttaatctattttctccatctctaaatactggagttcaagtgtgtggacagaactgaagacagctgtttttctcctgtagccccatcatcttttgttcactatctggtctctaaaagaaaggtgggcaacaggtgaccagcagttgcttattacctgtggctattttattcctactgcctatatgctcttaattttatactttattatctagaaaagtgtcatatgtatattggtgttgtgggccttatgctattctcttctctcagagttagagaatattttagagaatatttctgtgttaaaaattattggagaatttcagtcatttctattaatcagaaccaattctctttactctgtcattttattttaattcaaatgataaattctgctcatgaccatttggtaaatatatgtgtgtctgtgtgcttgcgtttttcaggagccattgtcatttagggatgtggccatagaattctctctggaggagtggcaatgcctggacagtgctcagcagggtttgtataggaaagtgatgttagagaactacagaaacctggtcttcttgggtgagaataactttaatacacaatttctaatataccctaaaggtttcctttctctttttttgtggaatgatttttggtaatttacgctttgcataaatgagtttctgatccattttttcaaaaaaatcttgagactttgtctgtgtggaaaagaaggtattcaagatgtctcatcttgacctgaactttccacattcctgagctggtctgtatccttcactctagattagtggtaattccagaaatgtagtggcataaaatattgttgcccatgtttttaggccaggcacggtggctcactcctgtaatcccagcactttgggaggccaaggtgggcagaccacgaggtcaggagtttgagaccagcctggccaacaaagtgaaaccttgtctctactaaaaatacaaaaattagccgggcatggtggcacatgcctgtagtcccagctactcatgagactgaggctggagaattcatttgaacccaggaggcagaggttgtagtgacccgagatcgtgccactgcactccagcctgggcaacagagcaaaactctgtcccactccgccccaaaaaaaaaagtatttatatatagttgcccgtattttaaaatctattcatcagcatcatgagtaccgggtagtgaaattaaggacctacaaatttaaaatattttctaaacatttagaaatttcattagtattttgagattaattttgggaatattctattacctcctctttactaagcatactactaggttggtaattggagaataagagaaagattcaagttattcatttctaataaagcaggtattgctgtcactaagccagacctggtcactgtctggagcaaggaaaagagcccgagaatataaagagacagatggtagccaaatccccaggtaggtgagagtgaacacaacagatgacacagatgagaggtccaaatgtcaaaaagaaagctggtccttaaaatgtgatttgggaagctgtgttccaaaggaaatagtttctgggatgtgtgagcttttttgttttttgggagtattttttgctgtgacataggggcatcttctctcttatgcttttaaattctttaaagattctgctttccctttggtgatcttccttcaagtgtacagtgagagccaaagtccttttcatggcatgtaaaagactgtacaatctccctgcttttccattatttggggggacacacagatatcagcataattttgggaaactctatgttaaactattttttagttttcctttttcatcatgtctgaaatgtgtgaaagtagaggtttctgttccattgttttgtttgttaatctttctgcacatttcatctgtttttaattactatattcttgaaatagagttaaattataaagtataatacccctctggtttgttcttttgcctcaagattgcttgggcttttcgaagtttattgcagtttcttgtaaattttagaattgtattttttattactgtgaaaaaaatgccactggaattttaataggaagttttttgaatctgtagattactttagataatatgacactttaacaatatttattctttcaatccatggacatgaaatattttaaaatttgtctcttcaataatttatttcattggtatcttacatcttttttgttttgttttgttttttgagaaggagtctcactcttttgccaggttggagtgcagtggtgcaatcttggctcactgcaacctctgcctcctgggttcaagcaatcttcctgcctcagcctcctgagtagctgggactacgggcgcatgtcaccacaccaagctaatgttttgtatttttagaagagacggagtttcaccatgttggccaggatggtcttgatctcttgaccttgtgatctgccccccttagcctcccaaagtgctgaaataacaagcataagccaccatgcctggcctatcttatatcttttattgtaaagattttttaccttcttggttaaatttgctctcagaaatttattattttaatgctattgtaaataagattattttctttattgtatcagatggtttaagtgtatggaacaataacttatacttgtatgttaattttatattttgctaatttactgagtgtatttattagtatagacaaatttcagtgcagtgtttatggtttttttatatataagatcatatgatccacaaacagtaactttttacttatttgtcttcaatttcagtggcttttcaaaaatgtttttgactcatgattctgccacttacttccagtcctacgtaaaaatagaagcattgacaataggcacaatatagttttgcattggtgtctgtgaatttgatagagcaaacacttcttcaagttgttttttttgttttgttttgtttttttgttttttttttgagacagcattttgctcttgttgcccaagctggagtgcagtgtcatgatcttggctcacagcaacctccgcctcccaggttcaagtgatgctctgtctccaaaaaaaaaaaaaaaaaggaaaattaatggttgtaaaaacacataacataaaatttaccatcttaaatcttttttttttcttttttgagacagaggctccctctgtcacccaggctggagtgcagtagcgcaatctcggctcactgcaacctcctcttcctgggttcaagcaattctcctgcctcagcctcctgagtagctgggattacaggcacccaccaccatgcctggctaattttttgtatttttaggagagacagggtttcaccatgttcgccaagctagtcttgaattcctgacctcaagtgatccttccaactcggcctcccaaagtgctggcattacagcatgggccaccgatcccagcctaccatcttaaatttctttaagtgtacatttcagggctagacctggtggtgcctcacaactgtaatcccaggatttcgggaggtcaagaaaggaggatcacttgagcccaaaagtttgaaatcagccagggtaatacagggagattccctctccacaaaattatttaaaaaattgccaggcatggtggtatgcacaagtggtttcagctacttgggaaatgaagagaagagaattacttgagcctgaaagtttgaggctgaagtgagccataattgtgccactgcactccagcttgggtgacagagtgataatgtctcaaaaaaaaaaaaaaaaagttttacagcccaggcacggtggctcattcctgtaatcccagcactttgggaggctgaggtgggcagaccacctgaggtcaggagttcaagaccagcctgaccaacatggtgaaaccccatctctactaaaaatacaagaattagctgggcctatgacaggtgcctgtaatcccagctactcgggaggctgaggcaggagaattgcttgaacccaggagccagaggttgcagtgagctgagattgccccattgcactccagcctgggtaagagtgaaacaccatctcaaaaaataataataataaaaataattgcattttagccatgttaagtatattcacattcttatgcaaaaaacttctagaaattttacatcttgtgaaactaaaactaaacacccattaagtaacaacaacccattttaccctctccccagcctttggcaaacacccttccactttctgttattctaaatgtgactatttaagatatctcatataagtagaatcatacagtgtccatcattttgtttctggcttatgtcaggcgatgtaatattctcaaagtttatcttaaaatgtgacaagattttcttctttaagactgaataggccaggtgtggtggctcacgcctgtaatcccagcagtttgggaggctgaggcgggcagatcatgagatcaggagatcgagaccatcctggctaacacggtgaaacccagtctctactaaaagtacaaaaaattagctgggcgaggtggctctcgcctgtagtcccagatactcgggaggctgaggcaggaaaatggcatgaaccaggggggcagagcctgcagtgagccgggatcgcaccactgcactccagcctgggtgacagagcgagactccttcttggaaaaaaaaaaaaagacctaataatattccattttatgtataggttacatttttgatgtgttcataaatctagagaaacccgggttgcctcagccttttgacttttgtgagtactggtacaataatcatagatgttcaaatatgtcttctaggtcttttgttgcatattttgaatatagattaatggaattgctgaatttaataataattatttttaattgagaaacgtaacattttaaaataatgactgcatctttgttttctaccaacaatcaacagaggtttcattttcattgcatcatcaacagatttggtgtctaaaaaatttatagcagccattgtaatggatgtgaggtgatttcatttttttcatttttatttttacatgtttctctacaaattgttaattttatgtgccatttcaaatggttttccccatttgtgtatcttttttttttttttgagacagagttttactcttatcacctgggctggagtacaatggcgcggcctcagctccctgaaacctccatctcccaggttcaaatgattctcctatctcagcctcctgagcagctggattacaggcatgagccaccacgcccatctaattttgtatttttagtcgagacagggtttcaccaccttggccaggctggtctcggactcctgacctcaggtgatccacccgccttggcctcccaaagtgctgggattacaggcatgaggccctgcacacgaccttgtgtatcttttagttcaattatttgttcatttctaaatcaagttattcaaatttattgttcagttttaagagttgtctctatattccattttttttttttttttttagatggagttttgctcttgttgcctagtctgagtgcaatggtgtgacctcagcttgatgcaacctccgcctccccattttaagtgattcacctgcctcggcctcccaagtatctgggattacaagcatgcgccaccatgcctagctaatattgtatttttagtcgaaatggggtttcaccacgttggtcaggctggtcttgaactcctgagctcagccttctccacctcggccttccaaagtgctgggattgaaccactgcacctggcccaaatattaactcttatcacatgtgacttgcaaatatttcccccatttcctatgaggcattttcattcaattgaatgtttttagtttctaatgtggagaaattttgaagtatagagtaaatctttctgtttttttgttgctgctcatgcatttaatgttgtatctaagaaaatggtgccaagacccatgtcatgacttttttctattttgttcaagagatttgttagttttttatgagtgtaagtattttattgaaaacattttttatatatggttcaaggaaattatccaactttatcagtgttgatatttggtttttaacattattgaaaagattatcttttctctattgtatgttcatggcagctttgtggaagatcatttaatcatatacacaagggttcatttctgaactctctattctgctctttcatctgtttatctgtctttgtatcagtaccatactgtttttgttattgtagcttttaatgttttaaaatcgggaagtataatgcctgtttgttcttttcatgggtgtttggttagttatagttcacaatcacatttaaaaattttaaagaatatttctgtaataactgctatttagatttttatagagatttcattgaatttgttcacctctgtaggttatattggcatcttaacaaaattaaaatttttgacccttgagcaggaatgtgttttattttaatttaatttaattttatttattagagacagtcttcctatggttccttggctagtttccagctcctgggctcaagcagttctcttgcctcagtcacccaaaatggtagtattacaggtgtgagccattgcactcggcccatgtgttttatttttagatattgttggattttccagctttacttttgcttttaattcctaggttttttttttttttttttttttttgagacagagttttgctcttgttgcccaggctggattgcaatggtgtggtctgcgctcaccacaacctctgcctcccaggttcaagcaattctcctgcctcagcttcccaagtagctgggattacaggcaagcaccataacgcccggctaattttgtatttttagtagagacacgatttctccatgttgaggctggtcttgaactcctgatctcaggtgatccgcctgcctcggcctcccgaagtgctgggattacagatgtgagccactgcgcccagcctttaattcctagttttattcagttttggtcagataccatgcagtgcatgattttggtcttcttaaatttatttgttgttgttttcagacaggatcatactccgtcacccaggctggagtatagtgtcataattttggctcactgcaacctcagcctccttgactcaagtgatctttacacctcagcctcctgagtagctgagactattgacatgcactgccatgcctggctaattttttgattatttctagggacagggtctcactatattactgacactggtcttatacttgtggtcccaagggatcctctcacttttgtcttccaaattgttgaaattatacatatcagccactacacccagctggtattctgtaataagacttgttatgtgttctaacagaatacatcaggtgcaaataagaatattgtgtattattttgcttttaactaaaaagttttgtacatgtctcttaagcctagtttgtctgtggtatggtttggatgtccatgttctgcaaacctcatgctgtaatgtaatcctcaatgttggatgtagaagctggtggggaggtgtttatatcatggggggcaaatttctcataaatgccttggcactattcttttgataatcagaaagtttacactccattaattcaaatgagagctgcttccttaaaagaacctggctttttctcttttttgtgatggagtttcactctgtactctaggctgcagtgcaatggcacaatcacagctcactgcaacctctgcctccctggttcaagtgattctcctgcctcagcctcccaagtagctgggattataggcactcatcaccatgcccagctaatttttgtagtttgttattagagatgggatttcaccatgttggtcaggctgatttcgaactcctgacttcatcgacttcccaaagttctgggattacaggtgtgagccacggtgcctggcctgaacctggctttttcacctcacacttgctctttttcttaccatgtcctgtttccattctctgcatatggctagccagttctcccagaaccatttgttaaatagggagttctttccttattgcttgtttttgtcaggtttttcaaagatcaggcagttgtagatatacagtcttatttctgagttctctattctgtttcatgggtctatgtgtctgtttttaccagtgccaggctgttttggttactacagccttgtagtatagtttgaagttggatagctgatgcctccagctttgttctttttgcctaagattgtcttggctatatggggcctttttgggttccatattaattttaaaatagttttctcattctccatcaatttttctttctttctttctttttttttgacatagtgtcactctatcacccaggctggactgcagtggcacaatctccgctcactgcaacctccacctcccaggtccaagtgattctcctgagtcagtttcctgagtagctgggatcacaggcttgcagcactacacctggctaatttttgtatttttagcagagatggggtttcaccatgttggttaggatggtcctaacctcagctaatctgccctcgttggcctcccaaagtgctggcattacaggcgagagccaatgtgcctggcctgcattgatgtttatcagagatgttggttttaaggttttgttgttgttgtttttatatctctgccaggttgggtatcagaatgatactgatcttataaaatgagttaaggaggagtttctccttttctttcatttaaatagtttcagaagaaatggtaccagcccttctttgtacctctggtagaattcagctgtaaatccgtctggttctgggcttttttttgtttggtagcctatttattactgtctcaatttcagaacctgttgttggtctattcagggattcaacttcttcctggttcagtcttgggagggtatatgtgtccagtaatttatccatttcttctagattttccagtttatgtgcatagaggtgtttatagtattttctgatgattgtatttttaattttttttttgacacaaagtctcactcttggcccccaggctggagtatgatggcacaatctcagttcactgcaacctctgcctcctgggttcaagtgattgtccttccttggccccccgagtagctgggattacaggtgcctgccaccacacccggcaaattttttttttttttttgtatttttagtggaggcggggtttcactttgttggccaggctggtctagaactcctgacctcaggtgatccacccacctcggcctcccaaagtgctgggattacaggcatgatccaccacacccagccctgatgattgtatttctataaggtcagtgctgatacctgctttatcgttttttactgtgtctatttctttcttctcttttctttattaatctagctagtggtctattttattttattttttaaacagctcctggattcattgatttttttgaaaggtttttttgtgtctctgtctcctatggttccactctgatcctggttattttttgtcttctgctggctttggggtttgtttgctcttggttctctttttcttttagttgtgatgttagggtgtcaatttgaggtctttctagctttttgatgtgggtatttagtgctattttaccccccttaacactgctttagctgcattccagagaatttggtttcaaataattttttgatttctgacaattatttactcagaagttattcaggagtatgttttccatgcaattgtgtagttttgagttagtttccatgcagtcgtatggttttgagtgagtttctttctcttgagttctaatttgattgcactgtggtctgagaaactgttatgatttcagttctttggaatctgctaaggagtgttttacttccaattatataatcaattttagagtaagtgcaatgtggcaattagaagaatgtgtattgtgttgtttttggctggtgagttctgtaaatatctatcaggtccacttgacctacagctgagttaagtcctgaatatccttgttatttttctttcccaatgatctgtctaatattggcagtggggtgttaaagtttcccactgtcattgtttgggagtctaagtctcttcgtaggtatctatgttttataaatctgggtgctggctgggtgtggtggctcatacctgtaatgtcagcactttgggaggccaaggcaggcagatgccctgaggtcaggagtttgagaccagcctagccaacatggtgaaatgctgtctctattaaaaatacaaaaattagctgggcatagtcatgggcacctgtaatcccagctattcaggaagctgaggcaggagaattgcttgaacctgcgaagtggagtttgcagtgagccaagattgtgccattgacctctagtgtgggtgacagagtgaaattccatctcaaaaaataaatcaataaatgaaaacaaatcttagtgctccttgaattgatccctttaccattatgtagtgtccttccttgtcttttttgatctttattggtttaaagtctgttttgtcagaaactactattgcaacccctgcttttttctgcttttatttgctttgtaaattgttctccctttctttattttgaggctatgggtgtctttgcatgtgagatgggtctcttgaatacagcacaccagtgggtcttgactctaaccagcttgccattctgtgtcttttaattggggcatttagcccatttaaatttaaggttaatattgttatgtgtgaatttgatcctgttctcatggtgctagctggttattttgcagacttgttgatgtagttgtttcatgatgtcattggtctttgtacttcagtgtgttttgcatttgctggtagtggtttcttcttttcatatttagtgcttctttcaggagctcttgcaaggcaggtctagtggtgatgaattccttcagcatttgtttgtctgaaaatgatttcatttctccttcacttatgaagcttacttttactgggtattctgggttagaaattcattcttttaagaatgctgaatattggcccccaattgacaccctggcttgtagggtgtcttcttagaggtccattttatagtaggtgacctggccttccctttggctgctcttaccattttttcctgaagtctaaccttgaagaatctgataattatgtgtcttgaggttgatcttctcatggagtatcttactggggttctctggattttctgaatttgaatgttggcctgtctttttaggttggaaaagttcttctggatgatatcctgaagtatgttttccaacttggttacattctttccatctctttagagtactgcaatcagttgtaagtggtctttttacataatccaacagttctcagagattttttcattcctttttatttttattttttcaatcttatctgccttatttcagcaagatagccttcaagctctgaaattcttctccctgcttgatctactcagttattgatacttgtgattacattgtgaagttctcatgttgtgttattcagttgcatcaggtcatttatgttcctctctaaactggttattcgggttaacagctcctgtaatgtttttcgtggttcttagcttctttgcattggcttagaacatgcttcattacctcaccgaagctgattattacccaccttctgaagcctacttctctcaatttatccatctcagcctgatcccagttctgtcctcttgctggagacatgttttgattatttggaggagtagagacactctggctttttgagttttgaacatttttttattgattattctcatcatcatgagtttatctagctttggtctttgaggctgctgacgtttggatggggtttttgtggggacatttttgttgatgctgctgtggttgctttctgtttttcttttaacagtcaggcccctcttctgtagggccgctgtgatttgcttgggatccacttcagatcctatttgcctgggtttctcccacacctggaggtgtcaccagtggagtgtgtagaacagcagagagaactgcctgctccttcatctgtaagctttttcccagatgggcactgagctgatgacagtgggaatacttctttataagttgtcttacaatgcctgttgggggggtggtcctcactcagtcaggatgcacaggattcaggaaccacttaacaaggcactctggctgcttcttggtgaagggggtgtgcttcactgggagaaattccatacatctggactgcccagatttttcagagccagcagggggaaagactaagtctgctgatctgcagaaaccacttcattgttacacttttatgtgtttcttgtagatatgtcttttctcatttcttgttttactgccttaatttttgttttaattttattgtgacatgctttattttttattttgttttgcatactttccataagtataatgtaatcttgaaatacaatgtaaccatattgaagaacagattacataaaacatcttaaagttaaaactatgtattttaatctcatcacacttcaattaaatacaaaacttatactgttatattttccagtttgttattaatattaaaaaccatattatcttacatcatgtatctattaacagatttatacagatttatatcttgttttttatatctgtagaagaactttaagggttttatgcagcatcattttgatagtaaaaaattctatatgtgtctgtatttacatttaatagagaacttcatatttatatatgttttatgatgctgtctagtatcattttgtttttcaacataatggactcattttagcatttctttttgtttgtatgcagagtctcactatgtttctctggctgatcttgaactactggtctcaagtgatctatctaccttgtcttcctaaagctgtagaattacaggcctgagccactgtgcctggctaccatttaacattttatgtaggactctggtagttgtaataaatgccctgaacttttattttggaaagtctttatttttatcttgtttttgaagtaaaataattttgaattaagtattagttagaaattcttttataacatcaaaatttgggaagttctcagtcttttttgtcttcaaataagctctgtattactttttccctatattcttctaagattcctttcatgaatatattgatctacttgatggtgtccaatacattttacattccatattttaattttgttttgcaatgttatatttttgtgttatatattttaaggtatgccacttcacaccatttacttgtgttttggtgttttattttatattataattgtgtatgacagtgtttaactctgtgcaatttaagacagtctagcaaaatcaatataaatcagccagaagtctactgccaatataattacctctgtgtttgtttacctctataaatgtcatctctgtttattttatcacttgtatatttgttttgtaggtttgttttgaatggtcgtttagtcttggctaggtgaccagttataaaattctcctaatttcagtatctgttgtgaatctacattacttctgtgtgggagaaatactttgggatttgaagataaaattgaaactattatatctttatatattgttcatttttacttgtcaaaaacacataaaatattatctttttttttttcttgagacagcatctctgttgcccaggctggggtgcagttgtggcatcttggctcactgcaacctccgtctcctgggttcaagcgattcttttgcctcagcctcctgagtagctgggattacaggcatgcgacaccacaccctgctaatttttgtattgttagtagagatggggtttcaccgtgttggccaggctggtatccaactcctgacctcgtgatccacccacctggcctcccaaagtgctgggattacaggtgtgagtcatcacacctggcccattatcaaatatttttaaataatctgtttagtcatattaattatagtgataatattacgcaacatacacctagaatgtttttatcttgcaaatctaaatctcagtgtacattaaacaacaaccaatttttctgattttctggcactttgcaaacaccactttgttttctttttctaagagtgtaactgcctcatatgtcttatacaatctctgtctcattgtggctagctcattttattttgcataatgtcatcaagctttatttttagagttgttagactatttcctgctttttaaatcctgggtgatattccagtatttttatgtcacaaattatatgtattggataatttggtgacagaaagttgcattgctgccgggcgcagtggctcacatctgtaatcccagcactttgagaggctgaggcaggaagataacaagtcaatagatcgagaccatccaggccaacatggtgaaaccccgtctctactaaaaatacaaaaaattagctgggcatggtggcacacacctgttttcccagctacttgggaggctgaggcaggagaattgcttgaacctgggaggtggaggttgcagtgagccaagtgtcactgcactccagcctgtgcaacagtgcaagactcagtctcaaaacaaacaaacaaacaaaaacaatagaaagaaatttgcattgcttttacttattggctttcagtaaaaatgctgcaataattatgggtatgaaaataactcttcatatgaccatatatgtgaaactttatataggtgctgcattctattttattagcctactttttacccattatactcataccaaattgttttaattctgtagctttgtaatgtgttttgaaatcaggaactataatgccttcattttctttttttgaagactcttgggtactttattgtctcttgacattttatatatttttggagttgtttctatttcctcaaaaatgcaatgagaaattttttaaaacattgcattaaatctgtagattacattgagaagtatggatgttttcaaaatatcaattatttctacctttaaacaggagcatgctcaagagtgtgttgtttaatttccatgtatttgtgaatttttagttctttttctattattgttttatactcattccattttgttcatataatccatacaatttcagtcttagcaaatgcattaagacttcctttttggcctaacatatggtctaccaaggagaatgttgtatgagcaattgagaagcatgtgtatcctgatattgttgaggagtcttctctatatatctgttagaaataattgttttatactgccttcaagtcctctcttcactaacaaatattctgttttgttttatttttattatggaaagtagggtatggaaatgtcctactataattatattgctgtctaggtgtttcttccattctgtcaatgtttgctttatatatttggaaacttaatgtgagatacacacacacacacacacacacatacatttgacttaggttatcagtaaatgaatctattattttttaatgtcttttgtctctttgcaattttgacttttagtacattttataaaatatgaaagtttttcacttaagatatagcttatgtcatattattttgacctcttctctcatttggttaatatttacttgcaatatgtatatccatcttgccactttcagttttttttatcagtagatctcagcttactcttgtagaaaggcaaattggatctcagtttttaaaatatttaaataaatctctttattaaaagtatgtttcttgattgcaaagttaaagatatatatttaaataattttctgaaacaggaagacatactaatgttattttattgttttatttgattcttatatcttggtcactcattttctctttgtctttgtgtctttttagttttatattgatatgtttcttttacttatttcttaatttgttttgtgcatctatacacatatgttctttgaggtaccttggggattacataaacctctaaaagataaaacagtatatttcaatctggtaaaaaggaacttcatttgcatgcacaatttttttctcattacatcttccctcaaatttgtcattgattttgctaattatatctttttatgttgtatatttattaacagatgtttataatgatttctgtgattttctctttcaactttcagataataattaaaaatgttttctgcaccattattataatgcaaagaaattccattttggtgtatgtgcatatacttagaagtaaaaatatatatgtgcatataatctttcccagaaaataaatgtagttttatatgattatgtgttgcttttgttgaattatgttattttcagaagaagcaactgctttcagcactttttatatgtagggtttatggagttccaatatacttttcagaattttgttatttttgaaagtttttttctttttatttggcaggacagatttgctgatggtattatgctgtcttgatcgctgtatttttcaggagtttgactttatcacacatttcccttctggtctgcaaaatttttgttgacaattcactggctgtctcataagactatgcttgcaaatgacgcatcacttttatcttgcagctcccaaggttctcttcttgtctgtgacttttgaaattgtgcttatatatgtgtttgttataaatatctttgtgtgtttcctagtttgtttgttgagcttcaacatattgccttattttgtatacattgtaacccttgattgaaatttggacattaaaaaaggctacctgtcacaatctttataatgtagctttgtcctggcatagtctgaacaatcgtcttggttagagattctgggagtctctcaaacatgttcttagaatgtgtcttgtctgaaatgttctttattttttagttaaaggaatttattcatgtttcttcttaatagtagtcacgtgctacacctgttttctctgtgtggtacagtagtctctctggtgctgtaacatttacctttggtctcagcaaacttaaactgtcactccaaagtataccaccatttctttcagcattatatttcaagagagacacaaaccagttttggaaagctcctagaagcaagtaacaaagatgaatgtgccagtattttacttgtcgttaaaacgttggcaatttacttctaaagacactatgttatattggggagcagaaagagctgtgttgggtaaatatagcagactttcacttccaggtggctctttgcgttgttctcaccatgggcacttcatacacttagctcatttgtaaatttttttcagatgtaatttggttggtatgtttttgttacatttacatgtctaaaggaatgagggcctttggtattttcctatgccatcttgtttatgtagtttgtataataagttagatttgaaaactttgtctgtgtctagcaagtaatttgttatttttatttctttcagttatatgttctcattttgcccaagacctttgggcagagcaggacatgaaagattcttttcaagaagcgattctgaaaaaatatggaaaatgtggacatgacaatttacagttacaaaaaggctataaaagtgtggatgagtgtaaggtacacaaagaagataacaaactaaacctgtgtttgataactaccaagagcaatatatttcaatgtgatccatatgaaaaagtctttcatacattttcaaattgaaatagacataagataagacatactagaaagaaacctttcaaatgtaaaaaatgtgaaaaatcattttgcatgcttttacacctaactcaacataaaagatttcatattacagagaattcctaccaatgtgaagattgtggcaaaaccttcaactgcttctcaattcttactgaacacaggagaattcatactggagagaaatcctacaaatgtgaagaatgtgagaaagaatttaaacggtcctcacaccttactacacataagataattcatactggagagaaaccgtacagatgtgaagaatgtgggaaagcctttaaccggtgttcacacctcactacacatagaagaattcatattggagagaaaccctacaaatgtgaagaatgtggcaaagcttttcaccaatcctcaaccctaactgcccataagataactcatgctggagaggagccctacaaatgtgaagaatgtggcaaagcttttgcaagattctcataccttaagaaccataagataagtcatactggagataaattctacaaatgtgaagaatgtggcaaagtctttaaccactcctcaactcctactacacataagagaattcatactggagagaaaccatacaaatgtgaaaaatgtggcaaagcctttaactagtcctcaactcttactaaacataaaaaaattcatgctagagagaacccctgttagtgtgaagaatatggcaaagcctttaataagttctcaattcttaacagatataagataattcatactagagataaattctataaaccagaaagatgtgacagtgcttttgaaaacacctcaaacttttctaaacataaaagaaatcatagtgttgagaaatcctagaaatgtgaagaatgtgataaagttttaagtggttgtcacacttgattgtaggtaagataagttatactggagaaaacttctacatgtgtgaacagtgtgacaaaacttttaaccagtgctcacaccttacttcacaggaaagcatttatacttgagaaatattgtataaatataaagactgtgaaaaagccattaatacatgctcacatcttactcaacatcagagagttcatacttaataaaaacattataagtgcaactactgtcaaaatatctttaagaaaatggaagcctctaaagtaaagaagattattttgaagaagaacattgtagtagggttgtaatatgtttacttgtgtcacagatcttattgtacacattttgtattagaggaaacctcagaagcaattgctcaaactttgtttaatatcagggaatttatattgaaaaaaaaaccctgcaaatgtaataaatttggaaaaatactttttcaaaaactacagcttagaaaacaccacagagttcatactaaaacatatttttgcagatgcagtaaaaatttaaagaaattttaatacaaaattaagtctatgtaaatatcagagaatttacagtagaaatatataaggcactgacacttcagatattatactaaatcacagtgctcatgatagaaaataatctaaaactaaagttgatagaaaaattattcatatataagtttaaaagaattttttgcagaattataattacattcaaagtatgcttaacttttggaaaacatagattttttgaaaagtgaataatgatgtaattcaattctcaaattatttcctgctgtttcttcattcctatttacatgtgagagcatgtgatgaattgttgctgcatccaagatatgagagattcttttttattaggtgagcattatttataaactttgttatgaaaatgtaaggacattaaaatgtaagatgcatgatgaaaatctaagtgaagagacctttgtggttaacttataatattgagtaatgtgtgagttaagtgttcagtcatattcttctgtattatgagaagaaaacatttttaatttcataagtaaattaaaatttagtatattgtactaattatacttttatataaaatgcagtatattttgaaaatttcagattatatgtgatgttaatatattcaacatctttaacattttaaatactgttgtgcattcagtgaagtgttatgtaacaaacattaattcccccttactcaaggttgtacataaaatatggtaataatatactatttgttaacataatggattaacttctctagtacttttgccagtggctttgactgcaaataagttaaacaatattatttctttaaattaaatttttgtttctattttatttaattttttttgagagggagtcttgctctgtcacccagtctggagtgcagtggcacaatctcagctcactgcaaccttgcctcctgggttcaagcaattcttctgcctcgatctcccaagtagctgggattacaggcacccgccaccacacccagctaatttttgtattttagtagagacagggtttcactatgcaggtcaagctggtctcaaactcctgacctcaaatgatccacacgtctcggcctcccaaagtgctgggattacaggtgtgagtcaccatgcccagccaaatttttattttatttaaatttatttttcttaattatttggggtacataatatgagtatatattcatgcaatatatggcatattttgatacaagaatacactatataataatcacaccagggtaaatgaggtatccatcacctctagtatttatcttttttttgttgttgagacagagtcttgctgtgctgcccaggctagagggtagtggtgcaagcttggctcactgcaacctccacctcctgggttcaaatgattcttctgcctcagcctcctgagtagctgggtttacaggcatgcaccaccatgcccagctaatttttgtgtttttagtagagacagggtttcaccttgttggtcaggctggtctcaaactcctgaactcatgatctgcctgccttggcctcccaaagtgctgggattacaggtgtgagccaccgtgcccggcttagcatttatcctttgtataacaaacaatccaattgtatgcttttagttatttaaagatgtacatttaaattgttattgattacagtgtaatttttatggtcaaaataaaagttatgtagaaatatgaataaaatccatacatttctgagtcctgaataaatatttttaaagttttctgatatttattttttgaacatgtttcctgtctgcccacaaacacatgcagacgtttagttttgatttacatagagttcaatatatgttagtctaaagataaaccttaggtgtaagaaaattatagagtaagtgagtttgtgtaagtatgaatttgtaactattttcagaagaagacaatattgaacaaggcaaatcatttcaacaagatgactactagaaaactaaaaaccttaaaaatgctgaaagcaagtatattctctgctttgtattgaatttattactgtacaatcgatggcttttggttctgaatctccccatgcaaattttgtttatacttgtctggtactcatgatagacccctaattactttgtatcttttcgatatatatattttatagtttatgaagtattcattatgtgagcttgtctgtgtttataagaataattttataaaatttagtagtgcatacaaaaattttaaatgtaattccataattagtgtattaagttacattttatttagttagaacactccattttgtttttaattggagaactctatagccctttagttatttttcttttcactttttataattggcataagtaaatttatttattgagttaatttgttcagataagtactagggaagctttataagtcatgaggatgtttttatatttaaatgtagcaggccgggcgcagtggctcacaccggtaatcccagcactttgggaggccgaggctggcggatcatgaggtcaggagatcgagaccatcctggctaacacggtgaaaccccgtctctgctaaaaaatagaaaaactttgcagggcgtggtggcggacgcctgtagtcccagctactggggaggctgaggcaagagaatggcgtgaacccaggaggcggagcttgcagtgaggtgaggtcgcgccactgcactccagcctggacgacagagcgagagtccggctcaaaaaaaaataaaaaataaaaataaatgtagcaaacatacatgacagttcttgccttgtaacagatgctccgaagtaagccataagtattcctgctaaagttagtttgtaacttcaagttagagatggaaaacatcagtggtgaagaattcagattgattcttcatgtggagaggacatattttccaggctgcaatgctgaatcttgctgaatttaaagagaagttctgcatcttttatttcttaattatcttcagatttgtctgtatttattatgtgtatcccagctatgtatgcagcacagcccttctcctttttctgtgttacggcttcagttttctcagtgttgtcttaatgccgtttcatttcacatggtactttgtaaattttgatgagaaagttcgcctttttttttttttttttttttgcgtcagagtctcgctctgtcgccaaggctggagtgcagtggcataatgtcggctcactgcaacctccgctttctaggttcaagcaattatcctgcctcagcctcccaagtagctgggattacaggcgcctgccaccacacctggctgatttttttttttttttttttttgtagttttagtagagactgggtttcaccatgttggccaggctggttttacacatcaggatcacctgatgtgatccacctgcctcggcctcccaaagtgctggaattacaggcgtgagcccctgcacccggctgaaagttggtattttttaatgcactgaaaaattggttttaactgaagagtttggttatcaatataactttcagatcagttaagataaataaaaacatacactgtccacgggtgagaggattaaatcagcatggtttttctttgtaaaaccaaaaaaaaaaaaaaattggattcttacacaaactgtggcaaatataaaatttgcttcaaaacatagaaattttaaaaagagttatggtaagtgaacatggtggcacctgcgccaccatgctcagctaattttttattttttttttagtagagacgagttttcaccatgttggccaggctggtcttgaactcctgacctcaggtgatctgcccacctcagcctccccaattgataggattataggtgggagccaccgcacctggcagagtttcttacatatttttgatattaactccttgtcacatgtataatttgcaaatattttctctcattttttagttgtctcgtcctgttgattgtatcatattctgtgcagcagctttttaatttgaagtcatctgactcatctatttttccttttatttcctaagattttgaggttaaattttaaaaaactggccaggcacggtggttcacgtctgtaattccagcactttgagaggctgaggcaggcggatcacctaatgtcaggagtttgagaccagcctggccaacatggtgaaacctcgtctctactaaaaatacaaaaattagccaggcgctgtggcgggtgcctgtaatcccagctactcgggaggctgaggcagaagaatcacttgaactcgggaggcggaggttgcagtgagccgagatcatgccactgcaccccagcctggtcgacagtgagactccgtctcaaaacaaaacaaaaaaccaacttactaatgccctgaacaaatttttttttagatggctccttttttttttattatactttaagttttagggtacatgtgcacattgtgcaggttagttacatatgtatacatgtgccatgctggtgcgctgcacccactaactcgtcatctagcattaggtatatctcccaatgctatccctcccccctccccccaccccacaacagtccccagagtgtgatattccccttcctgtgtccatatgatctcattgttcaattcccatctatgagtgagaatatgcggtgtttggttttttgttcttgcgatagtttactgagaatgatgatttccaatttcatccatgtccctacaaaggacatgaactcatattttttatggctgcatagtattccatggtgtatatgtgccacattttcttaatccagtctatcattgttggacatttgggttggttccaagtctttgctatcgtgaataatgccgcaataaacatacgtgtgcatgtgtctttatatcagcatgatttatagttctttgggtacatacccagtatccctgaacaattttatggggttttcattctatttttctgtagtagtttcagagtttcaggtcttacatttatttattattattactattttgagatggagtctcactcttgttgcccaggctggagtgcaatggcacgcgatctcaactcactgcaaccttagcctcctgggttcaagtgattcttctgcctcagcctctctcccaagtaggtggtattacaggcacatgcaaccattttgtatttttagtaggaaattttgtatttttctacaccagctagttttgtatttttagtagaaacagggtttcactaccttggccaggctggtcgcaaacaactgacctcaggtaatctgcccgcctccacctcccaaaatgctgggattacaggcgtgagccaccaggttcatcctaagccttacatttaagtgtctaatttacttttagttgatttttatatatggtgtgagatgagggtctcattttatttctctgcctgtggatataaagttatctcaacaccatttattgaagatactgttcttttggctcacgcctgtaatcccagcactttggcaggacaaggcgggtggatcaggaggtcaggagatcaagaccatcctggccaacatggtgaaacctgtctctactaaaatacaaaaaattatccaggtgtgggcgcctgtagtcctagctactaaggaggctgaggcaggggaatcacttgaacctgggaggtgggggttgcagtggcaagattgtgccactgcactccagcctggcgacagaacaagactccatcttaaaaaaagaaaaaaaaaaaagaaaagaaaagaaattgtcatctttattccaaatcagttagctttaaatacatggatatatttctggtctcttttttactgctccattggcctatgtgtctgtttttattcaagtaccgtactgctttagttactatagcactgtagaatatttgaaaggtatggtaataccttcatgtttttttcttgattgctttggctattcagggtctttcgtggtaccatatacattttctatgatgtatgccactggtattttgatagaggttgcattatacctgtagatcattttgtgtaatacagaaatttattaatggaattcaataaatgagtaatatttcatttgtgcattacttaatttattcaatgttatttacagtgtaatgtaaggtgtttcaactttttggttaagtttatttcaaagtatactacagttattgagatggaattattttttaatttcattttgagatagttgttagtgtacataaatgctactgacttttggatgttgcttttgtattctgaaagcttaataaatgtgtttattctaatattttatagtaaattcttaggcttttctgtatttcaggttatgtacagcaataaaagataattatacagggataatgtaatttcttcctaacctagatgcctttgattttattctctaatttctttgtcatggactttcagaactatgtttagtaagactgattagaatggacatctttgtcttgttttagcttttagagtaaaagcttataatatttcactgtttagtatgttgttagctgtgcatttttttgttatatgtggcatttattgactgaggtgcatttgttctatacctaattttttcagagatttatcataagggaatgtcaacttttgtcaaacttttattctgcttctgttcttttctttttgttctctgcatctatttaaatattagggatgtgaaatcacaactaatcctacataaatacaaaaaatcatgagagactactatgaacccctctatgccggcaaactagaaaatttggaaaaaatatgctgggcaaggtggctcacacctgtaatccaagcactttgggaggctgagatgggcagatcacctgaggtcaggagttcgagaccagcctggccaatatggtgaaaactcatctctactaaaagtacaaaaaataaaaataaaaaaaattaaccagaaatgttgtcacacacctgtaatcccagctactcaggagactgaggcaggagaatcacttgaactcaggaggcagaaattgcagtgagagtgagcttagatcgcaccactgcactccagcctgggtgacagggtgagactctgtctcaaaaaaataaaaaaaaattggagaaaataaataaactcctcgatacaaacagctttccaagactgaaccagaaataaacagatctcgaacagagcaaaagtgtataaaatatataatgaaactgaattagtaataaactaccaaccataaaagccctggatcatatgaaatcacatccaaattttaccccacatacaaagacattctgctgaatgtactccaaaaaatcaaggtaagattccaccctaactcactatataaaatcagtactatctagtgaacaaaatctagtgaaggcacaactaaaaaagaaaactccaggccgatatttttcataaacattaaaacaaaaatcctgcatgaaatactggcaagctgagttcataagcaaatgagaaagttattttgccacaaccgtgtgatttttattccacatatgcaaggatgtttcatcatatgcaagttataagtgcgattcaccatgtaaaaataattaaaagccaaaaattataagattaacacaatagatgcagaaaaagcattgaagaaaatccaatattcattcatgaaaatattctcaacaaacaaggcattgatgaaacatacctcaaagtgataagagccatctatgacaaatcctcagccaacattatactgaaaaggcaatagctgcatgcattctccattagaataaaaataagacaagaatacccactctaacactcctattcaacataattctagaagtcttagtcagagcaatccaacaaactaaagaaataaaaagcatctaaacagaaaaaaaggaagttaaattatcttacactgatgatataatgctctacctagaaaactttacagatttctggaagtatataattttaaaatataaattatggctgttaaatatcttcatttctatacctcttttggctaatattaaggttgattgaaaatataagttgttagaaaatttcttgaattaaggccattagttaattattaacataatttgagacataatagcaatgaaaatcagcattgattaatgaaacaaatattatctagcccctggtaatcattttctctcccacccaatgtgaaagcactatctttgtgtcatctctcccagttctaagaaagaggcttctgatcaaattgatcagcatacaaatttgtaaagtttaacttttagtctaaaaatttattatcagcaaagtttatcttttgatatgtaatattttattctatttaaattcttcagaaaagtgaaactgacacagcttgcatttaactttttttgtaagttaaaaatgcttaagaaactttttttatagaaactaaaacaaaataattttacatttttggagaacatttctcaagtacttcaagttatctttctctgacagtagatatatatttttctctattgctgtaatagagctttgactgtcctttgtggccgactctgtcatttttattctattttgttgtgtggtgtttatgttatgcatcttacattgtaaaagttgtagtccatgcaggcaatgtaataatttttttttttttttttgagatggagtcctgctctgtcacccaagatagaccgcggtggtgcaatcttggctcacggcaacctctgcctcccaggttcaagtgattctcctgcctcagcctcctgagtagctgggattacatgtgcatgccatcatgcctaatttttgtacttttagtagagacggggtttcactatgttggtcaggctggtctcgaactcctgatctcatgatctgcctgcttctgcctcccaaagtgctgagatttcaggtgtgagcccccacgccccacctgttttgtttttgagatgaagtcttgatctgtttcccaggctggggtgcagtgatgcaatctcagctcatggcagcttctgccactcgggttcaagtgattctcctgcctcagcctcctgagtagctgggattacaggttcccaccaccacacccagctaatttttgtatttttagtagagacagggttttgccatgttagccaggctggtcttgaactcttgaccttaggtgatgtgcctgccttgacctcacaaagtgctgggattacaagcttgagccgccacacccagcagcaatgtaattttcaaacaattgaccagcctttttccatgtcaaactctctgcttaatcagtcctttattttcactcttcaaaggcattttaactgtgtttttttgttttgttttgtttttgatggactttcattcttattgcccaggctgaagtgcaatggcatgatctcagctcaccacgactgctgcttcctgagttcaagcaattttcctgcctcagcctcctaagtagctgggactgcaggcaggtgccaccacatctggctagttttgtatttttagtagagatggggtttctccatgttggtcaggctggtctcgaactcccaacctcagatgatctgcccaccttggcctcccaaagtgcggggattacaggcatgagctaccgtgcctggccatatacatgcttttatgacaaatcattttgtgatcatttaaagttttaatttagcagttgccaagaccagctcagctggggagaccctaacccagtggcactagaggaattaaagacactcacagaaatatagaggtgtgaagtgggaaatcaggggtctcacagccttcagagctgagagccctgaacagagatttacccagatatttattaacagcaaaccagtcattagcattgtttctatagacattaaattaactaaaagtatcccttatgggaaatgaagggatgggctgaattaaaggaatatgttgggctagttaactgcagcaggagcatgtccttaaggcctaaatcgctcatgctattgtttatggcttaagaatgcccttaagtggttttctgccctgagcaggccaggtgttccttgccctcattcccataagcccacaaccttccagcgcgggcgttagggccattatgaacatgttacagtgctgcagagattttgtttatggccagtcttggggccagtttatagccagattttagggggcttgctcccaacatgcccccttctctgatttgcaaatcaataaaaacaagggcagctttctcacagtgagctacttctcacaggagtcgggatctacatctgcagactatacaaaggcaaacaacacagattaaaactacagccatcattgaaatcagagagcttccaagtgtttttatccattttaatgggttactagctgctaatttgtctgcacctcctttaaacactccagttcctggcattaaggtcaggtgtgcctgggatgctttaaatatttgttcttttaattttaaatccttatgttaagctcctagagcaggccatatcatttgaggttgaggtgccactataccgtcatggttccagataataggaacttttgccatacttattattatatctaccatctgaccattttgttcagatcacctgaacatagtgtgaccgtggcatgcagactgagaggtgcaattcaagctaaacatccccttaggggatcaattaataatgattccataggaaacattctgcagcacctctgcctgttctgcaaagcaatcttcctaaataagtacgttcattttttctactgggtccaatcctgtttacaaataggtttttgagggcagtatgcctcaattataggagcagatttattatggtaaatacggagatcagaaagcatgtgtaactgtgtcatagagtgattgcatccaggcattattaccagcccttattgaaggaatactcacagcaatggtgataaccactatcatagctaccattaagttattcattgtgactgattgtcctgctttcctcaggttttcttccaccatctgtgacagcttcttgatctgtccccaggtgggtggctgtgtttgacgggtgttgcttgtgacagttggggtcctcctcagtgtcagcctggacatggctgcaactggcgggtcctcaggatcctcccagaatctcttcctcagcatctggctcatgataaggtttcaggtgtcttgatggtatccaaatcagttgttgattttggcctggagaaatacaagtataacctctaccccaagttattattttacctatttcccaactttttgtagtcggatctctccaccaaatcagatgttctgttcctgtctttgcagctggtttctgtagatgctggtcagctgctgataacatctggcctttgggaaggttcaaaaaatttaaagttaataatgctagattcagttgtatctgcagtgttccatattctctatttttccctttctacttttgtgactgctgttttagggaaagattcattctttccactatggcttgtccttgagaattgtatgggatgacagtaatgtgattaatattccacatagagaaaaatgtagctagagtttggctagtatagcctggggcattatctgttttaatagaagctggaatgcccatcactgtgaaacactgcaaaagatgacatttaacacaagcagaaaactctcctgtttggcatgtagcccagacaaagtgagaaaatgtgtccacacatacatgtacataagctagtctcccaaacgagggaacatgtgtcacatccatttgccaaatagagttaggttccagtcctcgaggattaactcctcctgtaaaagatgaggaatataccatttggcaagttgggcactgctggataatagctttagcttctttccaggtgatgctgtatctgcatttgagaccagaggcattaaaatgggttaaattgtgaaagtgtctagcattagatattgcagtagcaactaggcaatcagccatttgattcccttcagtcaaaggtcctggaagaggtgtatgagctctaatgtgagtgatgtaaaaagggtgcattctactcctaactgctgtttgcaattgggtaaataaagtcatcagttgttcatctgtatgaaacagtagctgaccattttcaattaactgtgtggaaggaaccatgtatgaagaatcagaaatcacattaataggcatatcaaaagtagtcaatacctcaattatagctacaagctctgctttttgagccagaataagaagctttgctattactagacccatctgtaaaaacattatcagcaccttcaattggtttacatttagttattttaggaacaatccaattagttaatttcaaaaactgaaacagcttcattttaggaaaatgattatcaagaatacccacaaagtcagctaaatgggtttgccaagtaagactatttataaaagcttgctatatttgtgcctttgtgagagggacaatactttttccaggatcatatccatgtaatttaacaatctgagttctcccaatccctatcataatagcaatttgatctaaataaggagttagagtccgtgaattagtatgtggaaggaaaagtcactctactaagtcctgttcttggacaataacaccagtatgtgaatgctgagttgaaaaaattagcaaatccagagtcttctctggatctattctatttatctgagctttacggacttgcttctcaatcagttgtaactctccctcagtctcctttgttaaatgctgtgggctagtgagactaggatttcctctaaggatagaaaacagattactcatggcataggtaggaatgcttagagcaggtctatccaattaatatcccctaataatttttgtaagtcatttaacgtttttagttgatccctatgtatggttactttctgtgccacaatggtagtgtcatttactaaggtccccaagtaggagtaaggagtagcagtctgaattttgtcaggagctttaattaaacaagtgggagaaattgaattttgcaagtgattataacattggagtaatatttctcaagtaggggcagcacaaaatataccatccacatagtgaataatgtaacactgtggaaattttttatgagtatgttcaattgcttgcccaacatacatctggcaaattgttgcactgtttaacatgccctttggcaacactttcccatgataacgctcagcaggctgcaggttgtttactgcaggaattgcaaatgcaaacccttcacagtcttgttcagctaaagggatagtaaagatacagtcttttaaatctatgactactaaaggccaattttttggaattatagcaggagaaggcaatcctggctgtaatgttcccataggttgcataactgaattgatggctcttaagtcagttaacattctccatttacctgattttttcttaattacaaaaactggagaattccaaggggaaaatattggagctatgtgcacattttctaattgtttagtaattaaaatctctaaagcctccagtttttctttatttagcagccatcattctatccaaattggcttatctgttaaccattttaaaggtataggctctggaggcttaacaatggccaccatcaaatattatttcctaatctttgttgggaactttgtttttccacttgaagtggttctttcaaaccttgcaaatttttttctagtcccataccagggacataccccatttcatgcactgtatgttgactttgagggctatataattgttctggaattagaaattgtgctccccattgttgtaataaatctcttccccataaatttataagtacagaagttataattggttgaatagtcccagattgtccatcgggcccctcacaatgcaaaatttaactactttgatatacttcagtggctttaccaactccaactatgttaaattgagcaggttgaattggccacgtggacagccagtgctgtagagaaatgattgaaatgtctgctcctgtatctgccaaacctttaaatttctttccttgaatagttatttcacaggtaggatgtttatcagtaatttgatttacccaaaaagctgctttgccttgtttatttctgcttccaaatcctcctgtttgtttaatttcactttttcccattcccacatatggcacaatcaggagctgtgctatgcactctcttggctctgctttccagaaaacagaggtagatataacaatttgaatttccccattgtaatctgaatccatgactcctgtatgtatttgtacttttaaacttaaactagaccttcctaaaagtaatcctattgtccctgctggcaagggtccacagactcctgttgggaccctttgcaggggttccccaggcagaaggctcacagcttttctgcagcataaatctactgcagcactactggctgtggtgggggacagccattgtacaggggtgagggaatggcctgagctggaaatgccccggtttagaacagggcctgggacgggaccctcatggcgtttccagaaattgggttcccatctttatcaaacttagaatgacattgattagcccaatgttttccttttggacttatttcaggatcagcagttttcttttttcccctatctggtggcccgactcggtgattttttctaaattcttttttagtatgaccatgcttcccacagttaaaacaagctccaggaaatggagtatttcctttatccactctcagccctgccattgcctgtgccaacaaggtagctttatgcagattaccccctataccatcacaggccttgacataatcaactaaatgtgctttccctcagataggttcacagagcagcctggcaatcgggattagcattgtcaaatgctaataattgcaacactataacctgaccagctgaatctgcaatcatctttataagagactcctgtaactgagctataaaatcaatgtatggttcttttggtccctgttttatagcactaaaggaagggtattgttccccacctgaagtggtcttttcccaagctctaatgcacactcctctaagctgttctatgacatcatcctgcatgaccagttgtgcatctaaactagcccaaccgccaacccccaaaagttggtctgagttatattaatttgaagttgggcctgggcactgtgagcagcctgaatggaagcttcatctgcccaccaagttttcaattgtaagaagtgagcaggagttagacaagctcgagtaagagcatcccagtcagtaagaatcatctgactggaaacagtaacattctttaatagtcccattacaaaaggagaacttggtccatactgatttataacttgttttaattctttgagtaatttcaaaggaaaaggctcaaatgtagctgtaatatttccctgttgatctgggggttgtgttctaatggggaactgccaaggctctaaatcaccctctcgtctagcttgctgaattcctgcctgaatagaactaagagcggtcgctcgaggtgctgctcgaacagtcactggggcaactagttttcacccagtgtcctctggaaaagaaagatctgaaggttctttttcttcaaaataataatgagggggtgcagaagggtagggatgaacctctccttcctttgccactttagctttagctggcaaataaacctggtctgtaacctctactgttactttgctatactctcattcctcctcctcatcattgtgaaaaagttccaaggtaaaatgaaccagaccccatacctgtcccattgttaccctgacacttctgagctccccttcttactcaccatggggattgctttaagagtactcgggtgtcctccagctagttttccattccaaccattgctccggtgaccctttgacctggattgaagcccccacaaatggacgccacttgccgagaccagcttggtcagggagaccctaacccagtgccactagaggaattaaagacacacacagaaatatagaggtgtgaagtgggaaatcaggggtctcacagccttcagagctgaaagccctgaacagagattcacccacgtatttattaacagcaagccagtcattagcattgtttctatagacattaaattaactaaaagtattccttatggcaaactaagggctgggctgaattaaaggaatatgttgggcgagttaactggagcaggagcatgtccttaaggcctaaatcgctcatgctattgtttatggcttaagaatgcctttaagtggttttctgccctgagcaggccaggtgttccttgccctcattcccgtaagcccacaaccttccagggtgtgtgttagggccattatgaacatgttacagtgctgcagagcttttatttatggccagccttggggccagtttatggccagattttggggggcttgctcccaacagcagtgttgtctgggttttaaatgtgaatggtgacatatcagagaagaaataataaagaatacaaaacaaagcatgatagtgttgatggctgtgtgagacctcgattcttctcactttcaaaaaatttaaacaagagacacaaaacaatgaagatgcagcatagagtgatttattgcaaagtagaaatactattttaaaagttaggtgaagaatagccagcatttgctgagaaagaaggaattcagggcaggctgccaaaagaatgagacagcaaagactggaactagggagactccatttatgggagtcttacataattaattataaggaggtgggaagaggtgttagtagtaagcatgttctgggtggtccttttggtgcacagacacagtggctgtacatgcttatatgtcacatatctccttaacatcttaaatcttcacacacgtgtgtgttttttactattataatgagtaaaaggtcagttagaggataagtaaaatcaaaatgtgcatgctctctacagtgcaatttccctactgaagagagctttgcttgaatggctgaaatacagtgtaaatgctggggtttattgtgttgacaatatgcagtcaccgtgcaatcaccatggctgccacatcccgaggacatcgtcactttcttgactacctagcttgcctcaatagtacttggcttgatttattccaaattatcaactctaagactcagatttagctgttatgtcaacattgtcaacagtgggaaaattaaaatttttaaatcaaacatatatgagcttgttgggtcactagctgtgtatccaagagaaattattttacatcccaggagcttcaatcttaattattaatataaaacactatttcccctaaggctactttaattcatgaatggtagctataacacttgaaagtctcatctaaatattaaatatttaagagtaagaataaaatcatttttatttcaaagatatgataagtgagtgggtgtattttgtcatatttaatgtatttttcttttctaaaaaatgccataataattgtattttttccagaataacagactatggatatttaagttatgactttgccaatttttacatatggtaaaactgctactgttaaatttaggttaaattttaaacccactgttttttagcttgtgtggtttttggctcatttggggaacaaaatatattagacgttgactgtttggggtaacttgggttcatttctgctgtctgttattacatctggggatttagaaacaactaggattaaaataagtttggtttggaatcaagcaacagaaaatcccaaaaggactaaggaaaatagctaatggatactgcctttcagtgagatttatacacaaacagagtttaatgagattcatgaaattattgcaagttttttaaatttagaaaccaattacctacaacatattaggcacttgtcttaatttgtctatggcaaccctatcttggggaagctgatattacagaaaaggatattgctactgtaataatatttggaacaaatgtttatgtgcttatgaacagtcccctctaataatctttagatacatgtcattctggctcaatccttttggcatgactgtaattccagagactccttcccaccgaagcgaagccatggagttttcagctgcttatgcttattttcagttagtaagcttcatagctgacgtcattatattggggtccccaggaatccctgagccttagagctgaccatcctacctcatccttcttgcttctcatggtctgttgttgagtccctctcactccatatttgagccttcatgagacttcagtttggagaaaccagagaaatgggttgccatatgtattgagttgacaatcagaatccgtttgaggataaagactttacatttattattcatggtacaaagcagtatttttaagatgtgaacatgttttagtcaaattaaatataaataaattttttttgttatgacatagtctcactctgccacccaggctggagggcagtggcgcgatctcagctcactgcaccctctgactcctgagttcaagggattctcctgcctcagcctcctgagtagctgggattacaggcatgagccaccatgcccagctaatttttgtatttttagtagagatggtgtttcaccatttgttcaggttggtctcgaactcctgacctcgtgatccacccacctcagcctcccaaagtgctgggattacaggtgtgagccccggcacctggccaaatataaataattttatcagtatgccaatgtgattaaaataattttatcaagttcaccaaatgttctgctttagactctcccaacacaaagatcaatatgtatgcactggtgaatattagtttttttggtgtatggttttgtttgtttacatttttaaagattttttctacttcatgctgatgttaaactacacaaagcttaccaaaagcactcttttaccacatttttctactaaaagtttaaatacttaaattttgaaagtgacgttctggattacccttttccttgtgatggagtctgcgtttattagtcctacattgcagtttctctttatgtggtgcaaggctacaaaaatgccatccagttgattttgatttattaggtaacagtagaatctgttttctcaggcagtagcatgagaattcttgatatgttacctttagacgtactgaaagcaactggataaatttgctgaaatttgtctttattcttaagggcactagaggctaagtcatagcaacacacaatatagttcagtccaactttttttgtctaaaattttgtggagctgcatccacctgtatgatgtaactcagtaacagcttctttatactaagccagaactcattttacctgctggttttgttttaaatgtatgagctgtattatatcacatttaaatcagtaaatgaaatgaattcagaggttatggaaagaaaagtacaggcacactaaaaatgaatttgaatctggcagctgacactgattaacaggttgagcagattggactagacctgcattcctgtaaacaatattgaaagggagaattgaaaacatcttcagcaacacgataggcctatgagatttgaaaagtaaatcgatttgtttacccatcttcagtcaatactaggttaaactggaaaattttgaacacattattccaaaaatgaaattagtaaattattctcagacttaatatgattaaaacaagacttctgggtatttgaaagcaccaaattattgatgaaagatatccattttgaacagattcttgatcttatatatatattactactaagtaaaacctaatactgatagctttaatatatgaaatatttgtgaatgtctatcactgtagtgaaaaatcaagacattatttaaatctaaattttgattaaaatatttgatattttaattgagtgccagtattcatatagtatggcaaagcacccagttctttagtattctgcaattttataaaataagccagaatttgtggagacatttgttaaaaaaacaaaaacgaaaacaatcttttctaaaaaaaatctagacatcagaaaatagagatactaatgttacactatataaacagtttgctgaaccctacagtaatctgtgaagtttttttgtgtgcgtacaacaatcttagattacctaaaacaaaacgaagtttctttcttctgcttaacatacaaaagtccaaaatatatccggacagacaggaactgtggctgccactttaaaaaaaacaaacatttcaccacgatacactgttttgtgtatgaacagatggaaaaccaacctttgaagttttcaaatcataagcagaagcattgtgcctctaagccttaaatatataaaacaaatacacacagtttattcttcttaatttaaaatatactgttctttgaacatcaaacgacattagactatcaaaaacctcataagtcatacaagtgtcaactgtattttcaaaattataagaacttagaacaagtaaactaaacagctacagctacagtttagttaaaaataataataataaactactctgtatttgcccttgtgatgagaatcacctttattcattttggaacaaacaggaaatgctgcagtggtaacttgctgagtggcgactgcgatgagatttactgtcctagggatgatgggatccagtggaccagaatcgtcagcaccttaccatggtcactgctgtcctttcactctgtcattcatttatcagacttcttcatcaattccgtctctatcgttgtgtgaacggttttgtactgctttagcatctgcctttgattgctgctaattttctttgttcatctttctggtccatcttggtggctgctttgctgttcctctttgaggagttcgcgcagcttcaccctcaggtgttccaacagtccgtccatctggctcaagctgtcgggcatttttcctggttcttctgttcctggcgtctgagatttgtcagcagggcctggttttcagggaccacggctaccgcctccttctgcccgcggggcggctcctgcacctctggcgggcaccggttccagccacggtttagccgagaacagggggaaccgcagcagcagatggagcgcccacgtccggggtcgcctcggctctaacccttggtcatggctcagcttggtgcgcagaaacccgacgtcaatcagagcattttgcgcagctgggcgagctttcctcggcatgcggggcagttcccccatcatctttatgctgccacctccgctttcatcagagagttacacaggatggtgcaggggcccggagacaccgtggaagagtccaggggagtgaggaggggctgggccgggcagcctcaggcccagcgcatgatggcgccccctcacgcctgagcagaaatcagccactgccacctcggagaggacagaggggcccaggcttccccagccagcctcgctctgcaccagcagaggaaaaaattattttctaaaaataaataaataaataaataaacaaataaataagtaagtatggagaagaacttgcagttctgacccaatcaaattttcattctttttctttcattttttttttggccgttttctcttaaattgtgctctcctgaagtcagatttcatgttccatcctcacgtggcaatttaaatgtaattataatggtcccaaatttagaaactaaaaatgttaatgtattttacccatgagtgctaggttaacattaaattttcaatagtgctttctcaattctacacttcattattttctatttgatcctgttaactaaactatagaaaataaaaataataaaggtttgatttgcatagtttcacagtttacaaagaatatgtattcattcctttaaccaataaatgtgtgttgagcacacatgatatgccatcattttggtagccttagaaaataaaatagagaaaggaaagttttgatctctactctcatgaaactttcagtctaacttcataaaatcctcatgcattcctgagaagtggatacctctgaagtttcctataaacctcctaccccaatctgacttcaggagagcacaatctaagaggaaaaagcaaaacaaaaagaaaaaaagatgaaaatgtgattgagtaagatatgcaagttctattccataattttgttaggaaatagttttcatctctactagagcagagggaggctggctgggaagcctgggcttctctgtcctccctgcagtggtagtggttgatctgatctctgctcaggtgtgaggggcaccaccatgcactgggcctgaggctgcctggcccagctcatcctcactcccccggactcttccgtggtcactccgtgcccctgtgtcatcctgtgcatccttctgatggtagaggaggtggtagcaggaagctggtgggagggcctggctccataaactgaggagggttcacccagctatgggaaatgctctggatgaccttggatttctatgcagttagctggacctcatcccagggttacagccagggcatccctgagctgggtgacaccagatgtggatgctctggctgctgctattgtttctgtagaatcagcacccaccagaagtgcaagagccaccctgcaggtggaacgaggtggtagccatggttcctgaaaaccacaccctgctgacaaatctcagatgccacaaacagaagaacggagagaaactgcccaagagcttgagccaaatgaacggactgctggagcagctcagggtgaggccacctgcacttctcaatctggtacagcaaagcaaccatcagagatggacaagaataataaaaagtcaaagaaaattagcagaagttaaaggcagatgctaaagcactgcaaaatcattcatgccacaatagaaatgaagttcatgaggagttaatacaggagttcttaagaaattattttaggcagttaaagagggtaaaagagttcttactggaattttccttttataaaaagcagcccccaaaccattttattcctaacagaaagcagcctaaaaactcaatccgcaagcttataagcaagctagagggttgcatatgtaaatggaaatgcctgtactaaaagccaggtatatttcaacatggcaactttcccctcttttctttttcaccatgagtgcagatgtcatggtgacagccaggtagtagccacgtttgcataataaaaggctacggtcggggagccagtcttttcactggctatgtaaatggcatgcctgttcaaccaataccctgggccctatgtaaatcaatcactgcctcctcaagcctctctacaaaatcaatcgtgttctgccccaaacccagaaactctactgggcaacctgctttctcaggatgatgtagctttctctctctcttctttttgtctattaaactttctgctcctcaacccattcctcttgtgtgtttgtgtcataaattttcctggcatgagaaaacaaaccccaggtatttaccccagacaatgcagccatttcatttggaggcttgtccaggatcagaacaaaatatagaatcattggaatggtgagtatggagtgatcatcaaatctgtcctttaatttcaaggctctcagtctccatgttaaaatgctttggaccagtttcctttcacagagaatctaaccattgtatgaggctgggagaagtcctggaacaactgaggttttctggccagggcacatcctggtgttattcaaggcttctggactgaatccagcctttgacagctcatctacgtgttggtaaaggatctccaactatcttgtcacaaaatttttcttctttcctgtctgtggttactgtgtcttctatcctatctgtgtatgcaatgtgcaggaagtcttggtaaatcctgcagtactggggagcacgtggtatttccaagccaacagtgcaacgaagtggcaatagaaatcctcttcatgaggcacattgtcagtcctttgccatgcactgtagtttcccaactctcctccctttttgcactgctaaaaatcaggctctatgcctcttctgtgaatgggaaaggtctgccttcaacaattaaaagaaaaatgtcagccaggcacggtggttcatgcctgtaatcccagtactttgggatgctgtgcccggtgggtcatgaggtcaggatttcaagaccagcctggcccagatgttgaaaccccatctctactaaaaatacaaaaattagccagtcgcagtggtgggtgcctgtattcccaggcacttggaagactgaggcaggagaatcatttgaaccctagagacggaggttgcagtgagctgagatcatgccactgcactctagcctgggtgacagagcaagaatccatgtcaagccatccccatcaagctaccaatgactttcttcacagaattggaaaaaactactttaaagttcatatggaaccaaaatggagcccgcatcaccaagtcaatcctaagccaaaagaacaaagctggaggcatcacgctacctgacctcaaactatactacaaggctacagtaaccaaaacagcatggtactggtaccaaaacagagatatagatcaatggaacagaacagagacctcagaaataatgctgcatatctacaactatctgatctttgacaaacctgagaaaaacaagcaatggggaaaggattccctatttaataaatggtgctgggaaaactggctagccatatgtagaaagctgaaactggatcccttccttacaccttatacaaaaattaattcaagatggattaaagacttaaatgttagacctaaaaccataaaaaccctagaagaaaacctaggcattaccattcaggacataggcatgggcaaggacttcatgtctaaaacaccaaaagcaatggcaacaaaagccaaaattgacaaatgggatctaattaaactcaagagcttctgcacagcaaaagaaactaccatcagagtgaacaggcaatctacaaaatgggagaaaattttcgcaacctactcatctgaaaaagggctaatatccagaatctataatgaactcaaacaaatttacaagaaaaaacaaacaaccccatcaaaaagtgggcgaaggatatgaacagatgcttctcaaaagaagacatttatgcagccaaaagacacatgaagaaatgctcatcatcactggccatcagagaaatgcaaatcaaaaccacaatgagataccatctcacaccagttagaatggcaatcattaaaaagtcaggaaacaacaggtgctggagaggatgtggagaaataggaacacttttacactgttggtgggactgtaaactagttcaacccttgtggaagtcagtgcagcaattcctcagggatctagaactagaaatgccatttgacccagccatcccattactgggtatatacccaaaggactataaatcatgctgctataaggacacatgcacacatatgtttattgcggcattattcacgatagcaaagacttggaaccaacccaaatgtccaacaatgatagcctggattaagaaaatgtggcacatatgcaccatggaatactatgcagccataaaaaatgatgagttcatgtcctttgtagggacatggatgaaattggaaatcatcattctcagtaaaccatcgcaaggacaaaaaaccaaacaccgcatgttctcactcataggtgggaattgaacaatgagaacacatggacacaggaaggggaacatcacattctggggactgctgtggggtggggggaggggggagggatagcattaggagatatacctaatgctaaatgatgagttaatgggtgcagtacaccaggatggcacatgtatacatatgtaactagcacattgtgcacatgtaccctaaaacttaaagtataataataataaaataaaaaataaaaaaaagaatccatgtcaaaaaaaaaaaagaaaaagaaaaagaaaaatatcctccataaccaaattttgttccaatgctatcccattagcaaataaataaatcaataaataaaagccgttattctgtctccaattagaagagtacttaattagtaaggcaattttaagtccagaagttaattggaactgttttctaagggaaaatgttttagcatgggccgtaatagcaggatatagagctcaaaccagcatacttcctccattaaggaggaaggtgtaaccattgcctacatgctaccattacacagtttctccagagatcctttctttggggtgccaggcagatcacacaagtttagaaagtcaaagggtagtcatagtggataactaaggctgtgtgggtaattgttgttaaatcccatcacttcattcatccagttccatggcttggagggccatacctataaccatgggtggcacatttaacatggtgctgggacccaggaacaaaggagaaaaaacagtcagggagatgcttcaactgttttttcctccaccctgggtcacatcaaaaggagggagactaaaagaatgcttttattctcacttattttacttttttttttccttgagatacagtctcactctgttggccaggctggagtgcagtggcttgatcttgactcactgcagcctctgcctcctgggttcaagcgattctcctgcttcagcctctcaagtaactgggattacaggcacgtgccaccatgcccagctaatttttgtatttttagtagagatggggtttcaccatgttggccaggctggtctcaatctcctgacctcaagtgatctgcctgccttggcctcccaaattgctgggattacaggcatgagccaccatgcccagcctattctcaattctttttctagatgggtaacagaccaacttcagcaactctctggagtgtactctgaaacaccagaactcctttaacctcaggactttgaagagaaaagtgactttattttatttatttattttttattttttgcatggggcatggtatttatactaaacttttgcaagtgtcataagattgacccaggttttttttgtttgtttgttttgacattgagtttcacttttgttgcccaggctggagtgcaatggtgtgatctcgcctgactgcaacctctgcctcccaggttcaagtgattctcttccttggcctcctgagtagctgggattacaggaacccacatccacacccagctaatttttgtatttttagtagagatggggtttcaccatgttgaccaggctggtcttgaactcctgacctcaggagatctacccaccttggccttccaaagtgctgggattacaggcatgaggcaccgtgcctggctcaacccatgtttttttaatagtcatatcaggcaggctcatagagaataactcccccaaattagaaagcaacttctggtggaaccatctaagagtgtcccttatttggggccacctcaactttccttctcataacaagaccttaggcaagtaaaggaagacaggctgattttctgacaaccccaataggtatatagaagcatttctgaatttaactcaggtgtttcacctcacatgaaaggatgttatgctgcttctaaaacaaaccccaaccacagctgaaaagcaggcagttctgcaggcagcagaggattttggagatgagcaacaaatctcctataatacgccaaaaaggaaaaaagggagatagggaaagtgaagaaatagcagaaacaccatttccaataggaagtgaagcagttcctcttgacaacccttggaaccccaatagctctgcagatgaatggaaaaggaaatactttttttttttttaagatagagtcttgctctgttgcccacttgctggagtgcagtggcccaatcttggttcactgcaacctccacctcctgggttcaagccaattctcctgcctcagcctcccaggtagctgggattacaggtgtgtgggaggacacccagctgatttttgtcctttcagtagagatggagtttcatcatgttggccaggctggtctcgaactcctgacctcaggtgatccacccacctcggcctcccaaagtgctggggttacaggtatgaaccactgcgcctggcagaaacactttttaatatgcatataagagggcctacaaataactctcaaggccaaacctctcaattattctaaactgtctatgattgaccaaaagccagatgagaatcctgcagcctttatggaaaggctgagagaagcactaacaaagcacacctccttattccctgattcagtcgtcagacagcttattctaaagaacaagtttattacacagacagctattgatacagaaggaaacaacagaaacaagctataggaccagatagcaccttagagaacctcctgaaggtgaccactttgttcttttataatagggaccaggaggaggctcaagagaaagagagaaaagtcaggaggataaagctctagtagctgctttggaagcttgcaaagtccaggatccctgaggtgcatctgctagttgccattggtgtggtaagtcagggcattttaagaaggaatgcccaaacagcaagaagaagccatctcgaccctgtccagcatgtgatgaaggccactggaaatcaaactgcctccagagacagaggtcactgggtttacaactaaattacctctcgaatccaggcctcccctcttcccatagcatgactgtaaaggggcatctcaggaaaaactgtaatatttttctcaatctcttagttgcagttaggagcacttgttatttacgtatgcctccaagccattgtcacggtagctgtactagtcagaaaagcctctaaccctaggaaataacttaactgtttacaacccacgtaatgtggcagaattactgtcttctaggtggagcccttagctaacaaccaaccagtatagcaataaatacataggccaggataagcagtagtcactgtaaataatgtctctctccagacacaagtgctcaattagctggactaacagctcttacaagagcacttgaattaagcaagggaaaggtagctaacatttccactgactccaagcatgttttcttagttctccatgctcatgctgccatttaaaaggaaagacattttcttaccactaatggatcttctataaaatatcaccaggaaattaacaggttattatcctcagttttccttccatgagaaatggcagtgatgcattataagggacatcaaaatgaacaaataaatagccaaaggaaataggttagctaagcaggcaactaagtcagtggcaaggaagccccaaggcatcaatatacttcaagtccttttaatctaggaaggccctataagagaaattaaacctcagtatttttcgcagaaataaaataggccacttttttttttctttgagatggagtctcactcttttcatccgggcaggagtgcagtggcatgatctcggctcactgcaacgtccacctcccaggttcaagagattctcgttactcagcctcccaagtagctggaattacaggtgcccgcgaccatgcctggctgatatttgtatttttattagagatagggtttcaccatgttggccaggctggtctcaaactccttacctcaggtgatccaccctcctcggcctccaaaagtgctgggattacaggcatgaacctctgtgcccagccaaaataagccatttcttgagggcatactttccatccctcaggatggctacagtcaggggatggcaaactccatttgccagcctccagccaatggaaagtcattaaaatcctgcaccaagattttcacttaggaacttccaacagtaattaacacaactagaaaaagtccaacctcaggaaatagaaccatctctatttaacccagatttggtattagtgaaaactctcccttctctgcttccctaagccaagctaggaagggccctgcactgttcttctccctcagcagtaaaagttacaggtatcaagttctgaatacatgacactcaaatcaaagcctgaagagctgagggagcaacccctgatggcccagaggaacgtcctcaatatcaatgtgaaaaaatagaagaacttaagctgaaaaccataaaagataagtgaggtctactcatcttactcagtctcatttactcctcactaaataattttttaaatttttgcccttttctctcaaaatttactttaatatcttaaaatattagaacatttaaaaatgcatacatgcagggagattttaattatacatgggtttgcatttgtaatttcatagaaccccaaaggaaaatgttatttcttggcaagtaaaattttaaacaaaaattattgctgggcatggtggctcagatttgtaatcccagcactttgggaggctgagttgggtagatcacctgaggttgggagttcgagaccagcctaaccaacatgaagaaaccctgtctctactaaaaatacaaaattagctaggcgtggtgtcgcatgcctgtaatctcagctactcgggaggctgaggcaggagaatcacttgaacccaggaggtggaggttgtggtgagctgagatcacaccattgcattccagcctgggcaataagagcgaaactctgtctcaaaaaaaaaaaattatctattatgcaactcttgcacgaattgttatactcactccactatttgcagaactatacactttggcacccgtaatgtgtaattctgattgcaaaattctaattgctataatacttggccgagttatcatacttataacagtattaataattgcaggatttagtgaaggttgttttgcttaattattatccttgtatcagaggtaatagctacagacaaaagtaagcatgaaagttttacttcactgagcttgataggacttttcattaaatattggtaatatgggctgggtgcagtggctcatgcctgtaatcccagcactttgggaggctgaggcgggcggatcacctgaggtcaggagtttgagacaagcctggctaacatggtgaaacccattgtggcaggcacctgtaatccaagctacttgggagtctgaggcaggagaatcacttgaacccaggaggtggaggttgcagtgagctgagattgtactgagtgagttgtagagaaatgccacactttgagactaattgaggagtccttttattgccggcgaccaagagatggctagtgctcaaagttctcttggccctgaagaaggggctagattttgttttatattgtggtctaaataggggagggggagtttagctgaagcaatttttacagaagtagaacaggcaaaaagttaaaaaattaattggttacagaagcagttacagaaaaataaacagttccaggtgcaggggcttaaactatcacaaagagataaatgcaggggttttaggggccatccactgagcatgtccccaggagctgctggttcagcttgcctcaataccttattagtaagtgcattcctggatgtgcttggagtcagcttgcactagttatgcccttacgggagggaggcaaaggggctgtaagtgaaggaactaaaatggagtctgtctggctctctcagttaagagagacaattaggttaaaacaaggtagggtatcacattccccactcgtgttttggggaatcaaataattgattccttggttataacaagggggtatgttgggttctatgatacataagtttggtagaagttatgtgctgctttataaagttaagaaaccagtttaatatatgaggcccgaagactaaacctaacaggaagaggagaaggggtcctgccaatccagtaattaggatagttagccatggattccagttaaaggtgcttttgtaccagggggtgttactttctcattcctgttggcatctatctagatttttttgaacttttgggggtgtatcttttacgactctagactgattggcatagaaacaactctctcccagagctgcgcataaccctccttgggagagaaatagtagatctaagcctcagcagttttgaagggctgcttcagctagagactctacctgggtatgcagtatatttctggctgattggagattgcttaaatctgcatctacttgttgggacagggacattagtccagtttccccttgaataagggcagctgtgctgatggctgctgatccagctatgctaaggctggccagaaggggcacaaggagtggggcagctcagcaaaacctggaatgtaattcagggggagcaatgagaagttgtccctctggcccactgtacacatagacctgggggagcacatgaaccaacactcacaggagaggccccggttaagtcccactgatgcagcaagtgaggtcagaagtgcaggccagccaggtattgttgggtgcctggtaggagactgaggtgtttaaggtagtaagtagagaatgattacaggtagcctgaaaggcagaagcagacaagttatacccagagctaattagacaggaggtgttctttgacacttctcctagtgtaagggcatggggctgtgtatgacaagaaagagagttaactttgaacatggctttattcctaacccaacataccatgggggtttggccttcaggcacaaccagcaatcttgggctagtttaggctggatgatatttaggaggtgatgtaccccatccagaatggatatcaggctggattggagatgttgttgttgtaactgagatctgggaacaaggagtggtggtgggatagttaaattgaccctgtctgggtgtctttggaacatagggtcacctaaatcagttaaaggcctggttgacttaggagggctctatgggaccaggacctttttttggatggtgaacatagttccaacatcaaatcctgagatacaaagccttaatccccatgacatgccataataccattgagctgaattagggttacagacagttatagtgagagggctacaattttttatagtacacggtctaggacgggaattgtgagttatggaaagggttgaggaccaggttgatcctccagggtaagtggctagggttacacacgaccagtgagggcagaaaaactgaaaagaatctcaacaactagagtcagggtgattttcaagacagaggtaaaagtcaacgccttggagtcctttttttgcacctttagagctcccacctccggtctagcttcctgtgtgtctgaatcctgcagcaaggttgatgttccccactcctgcgactggcagattgcactgttcttcatgggtacaggcaggctctgggaacaaagcacataaatcgactgcaaaagagacttccttggaggttcctgccttccaagtagtgtttgaaaactcacatcctgttgtgaaagacgtgaggagaaaagagtaggatggagcagacggcataataggcagaaacaaacaaaagaggtaaataaaaaggattaatttgatggctttactcaacttaggtgcagttttaaggggactggcccaggcttggggacccatgtttcctgctgggctttgttggctttcttgatgtcagagtgatgaatccaagcatggataccatccacctttagagccgttggcgtggtgagaatgacagtatgaggtcccttccaggcaggagtgagtccttctttctggaactttttaacatacaccaagtaacccggttggaaagagtggcagggtccagtctggcaggaaccggattggaatgtgctcaccagaaaagtggctggatgatgtctcatacctgttggagagactgcaagtactgtaacaaattagcttgtgagatttctgctaaatggttatctcttagcttaggcaagctagtgcaccccttttatacatgatttcaaaaggtgaaaacccagcccggtaaggggtgcatcttactctaagaagggctaaaagaaggagccttacccaattttcacctgtctctaggattaatttagtaagagtgttttttagggtgtggtttatgcattctacctgtccagagctctggggtcgataggcgaaatggagtttccattgaatgtttaatggcttgctgaccgataagctatggacgaggtgaaggctggtccattatcagaccccatggcaacaggcagcccatgtcgagggatgattctattgagtaaaagcctaactaccatggtggcagtttcatttctgtggcaaatgcctcagtccatccagaaaaaatgtctactagcaccaggaggtatttataccctgtccggtgtggttttatttctgtaaagtcaattttctacttttctcctggtgagcttccctggaggccgtggcctgggctaggcttgggacctcatctggcatttacctgagcacaagccatacaccagagagctgcttggttagttaagtcctgaaggtgggggatcttgaaatggctctttagaagctgggccagttttattcttcccaaacaggtggtagaatgcagatgattgattaaagtttccccaaaggcttgggggcataaagattctggaatcaggaagaatccaccaaccttcctgatttttactggcctgaagatctgaagctagtttttcttccactggggagtattctggttggtctggcaagtcagtttgtggaaaggacactgtggacagcagggttaaaggggtgactgggagcagagctgcctcttgagctgcagagtctgctctttggttaccacaggcaacggctgtgctctgtctttgatgtcctttgcagtgaattacagccatctgctgaggaagccaaacagcttcaagcagggccaaaatttcttctttgtttttaatagtctttcctgctgtggtgagtagccctcactcttgatagatgactccatgtacatgtacagtagcaaaagtatacctgctgtcagtgtaaatgttaatacatttgtccttaccccatcagagagcctgagtgagggcgaccaattcagccttctgtgctgaggtacctgccggccgtgcctaggcccacagtatatctgtctctgttggaatggctgcaccagcctttcatactccctgttcaaggaagctactgccatctgtaaccacggtggcatccaactcctttgggggcacatctcagagatcaggtcggccagtttccatagtctctaacagttcttggcagtcatggacaggtgtggtaaggtctggatcagggagcaaggtagctggatttaaacaccttgtgggagagaaagctaaacaaggctgatctaacagtaaactctgatactgcaggatgcgagcatttgacatccatttgccagaagcacttcatagcaaagtttctatggcatgaggagctgtaagggttaaattctggcctagagtcagtttatcagcctcctggaccaggcttgtttttgctgctgtggctcgcagacaacgtggccacctggagaccacagggtctagctttttagacaaataggccactgggggtcaccatggtcccaaagtctgagtaagtacacctttagcaactccctggctctcatgaacaaaaaggtgaaatggttttgagatatttgggagggcaagagcaggggcctcagttaatgtcttttttagattttgaaaagcctgttcttctttgtcagtccaaactagtgggccattccctccggtagcagtgtacaggggcttagcgatttctgtgaaccccagtatgcataaatgacattatcccatggtccccaggaattcacatacctgtctcttggtggtgggagtggggattcgcaggatggcttccttttgagcactggtgagtgccgtttttcctttgtttatcttttaccctaggtaggaaactctgggaagacaaagctgggccttcttggtgagacctggtacccgagttcctgcagaaggccaagcaggtccctagtatgttgcaggcagctgtcagtaatttcagtagctaataaaagatcatccatgtactggagaagagtacagttagggtgactggctcagaacggtatgagatcttgttggagagcttctccaaaaagtgtgggggaatttttaaaaccctggggtaactgggtccaggttaattgggtggtgtttcctgagccaggatctgtccattcaaaagcaaagataggttggctttttgggggccagaggaatagccaagaaggcatcctttaagtcagtgacagtgtatactgtatgttctggtgggagcagtctgagtaaagtataagagttacggacagttggatggatggtaactgtccacttgttaacctctctcaagtcctgtacaggctggtaatcatttgttctgggtttctggactggcaaagatggagtattccaggcagactcacatggtgtgaatataccagcttgtaacagttgctgaatatggggatagatttcccctctagcctgctgactcataggatattgttttacctggactagcaaggcagtggccaggagttgtacaactactggcagatagtgctttgccagtcctgggggtttgactcagcccagactcaaggaaagagagtctgtaaatccagtaggagaggattaattttattatccagtgcttgtgagggtgaaactaagagattttttttgatggaggggtggttagcaggagctgaacagcagtgggcattgtgtcccctaaagcaaggtgagcttgttgggccaagaaggagatagacgccttcagcttatgaagtaggtctcatccaaggaggggaaaggggcactctcggactatgagaaatgagtgggttgctcttttctgtcccaaactcacctctcatgagtgggtgacaggatattcctgaatagctccagtatccccttgcacagccacctttttattagagacactgcccaagggcatttgcagtactgagtgttctgccctggtgtcaattaggaaacgtacaggccggccccccactgtggcggacaccatgggttcccgggggccaagggagagggagacccagccccatcaatcagcatattcctccacagcagggaggatgaggacctttttattctctggtttttcttctggttttaatgggcgttccttcttccagtgtcaaatctgcttgcaataagcacattggttttttagtacaggagcctgctcacctttttggcctttttggcagggacccgagatctcctggccagcgctctgtgctgggggcccttccctcctggcttcttggatggcagccactaagatttttgcctgtctttttgatgctttgtcagcagccttttcagctgcctgagatgcctctttttgtttttcaaactcttgattgtcaaaaactttctgtgctatttctaaaagctgaatgatattcattccagcaaatccctttaatttttgtaatttctttttaatatcaggggcctcctgagccacaaatgccaaattaatagcacggctattcttaggagccgctggctcaaaaggggtgtaagtccaataggcctcctggaggtgttccaaaaatgctcccagtgactcatcaggcccctagaaaacttcagttgtcttagataaatttatgggtttttgagttgctcctttgatacccacaaggagataccagtgaaaatcatccaaagctgtctttccccatgaggagtttggatcccaactgggccgggtagagggaaaaacctccactaggaggtcttgggcttccccctctggtctaccggctgatgtaaggaaatacttcctagcctcccttcagatacagtccctctcttcagaggtgaaaagtgttaaaaggagttcctgacaggcatcccaggtgggccagtgagtccggagcatggattccatcagtgaggtcaagacctggggcttttcagagtaggggggattatgaacctttcaattgtacaggtcagaagtagagaaggggacataaactaaaaatggagcagagcgctcactgcctggagggatttgggcctctctcagcaggaggagaggggccacctcctctggctgaggccgtaattgggtggctataggtggagaagccacagagcatgtagtcaaggagacatgggaagattctgggagagcaggagggttgtagggtggcaaacatgggtgaggaaaactttcctcttctttagaaggaggcagtacaggaggagccgagggagctgagggttggggcaaaagtgcagtcgggctcaaaaggacctgggaggtgggatcatgaatggtgcatgagcagagccatggaggagggctctggaccaaatctagccattgatcaatgtaaggaaactgattggggtgtccgggagttccagcaatgacctgccacacagtctgcacagttgtgagattcagtgacccttctaggggccacctggttccaaactgtggccattccacttcataaagtgtccagagtttgctttcttaaggcagactccataatcctctgagaagcccagagaggaattttgtaacgtatattggaagggctccaatctttatggggccaggaagaagagttccccattctggaggcaattaacaaggtctaggcgaaatattaaactcagcatggacagagaaattcacaatctggggggctgtagtataggaagaacagaagtattataaccagaagaagtaggaaaacaactatagccaacacttcttgtcacataagttctgtttctttaagctttgagatctagggggaggacaagaggtgggtctgaggccagtgggacctatgtgatcctcccctcctttctgacttatagcccaaatatctttggtatctccacgactcaaaggcaaaaagtttaaagttggccctttcttttaaggattttaggagggagagtagagtcattggacgttggacttgctgtgacacaggaaaacaagatgggtggggtaagggatggggatgaggaggaaaggggccactctgatcttttctaaggtaggagagtagccagagggatagaataagaatccaggtggagtaaagcagtatgggcacaggtttctctgcacagtgccttatctaagggcatgggaaaagttatgggatgacagaaaaggtgagcaaggaggactgcagggtggctattttgaatccaccactggtctaaggcagaggtggtccagtcactggggcatggggtgtggcaatccaaatgctagcaatctttatggtgccagaaatcccaaacgggcaaatgttccccacacgcctccccgtaacaacacctgatttgtttctgacagaaaaggcaggactgggaagaccagcccaaatgactgatgagaaatttgacctcctgtgttagaaaatctgcattcaggactttaaagaagttcttgcccagtcatcttcggaaatatcgatgacctgacatgtgaaacttagacagacaccagacaggacaagagacaccggggtatacaaacaattatgacaatttttatagacagacaaggggagggggtcccgtgatgggatcagccagatgcccacctggctgctccgccggaggggacttaggctcctcttggcattggcagaccggtataaacccaccggctcagatcaagctatgcccgatgctgccttaagccttatgaggtcgccacggaaccacaggtgagggcccactccaactccgtagctttcaccgtggagctgcaaactggaaattcaaggacaagcccttgaaccccacattcacacacacacttacacagagtttatcacaattctttattcccattctaaaacagaggtctcctagaaacctgaatgagagaaggagaagagataaaaagagagagagagaaagacagagagaaagacagagagagagagagagagagagagagagagagagagagagagaggctagtcttaacagagaaggctgacagaaaccaggactccgtcctccagcatcctggaatatgggcagagtcagaaggacgccctcgtcagggccgcttccctcccagagaaacagagtcagatctgacttaccttcccaggaccagaaatgcaggactcaggagttgattttggagggcacacaccggcagtcgatccgttcccctccggaagacagtggcctacgggtctctggaacagcttcaggaggtgcctcccctataagcccgctgtccagccaggagagcctggagcgagtccggcactcaccaggtggcaattatcttgctggggcttccaaatgttgtaaccgagcgagttgtagagaaacgccacactctgagactaatttcaggagtccttttattgccggtgaccgagagacagctagtgctcaaaattctctcggccccgaagaaggggctagattttttttatatcgtggtctaaataggggaggcggagtttagctaaagcaatttttacagaagtagaacaggcagaaagttaaaaaaattaattggttacagaagcagttacagaaaaataaacagttccaggtgcaggggtttaaactatcacaaagaggtaaatgcaggggttttaggtgcgtccccaggagctgctggttcagcttgcctcaatatcttatcagtaagtgcattcctggacgtgcttggagtcagcttgcactagttatgcccttaagggagggaggtaaaggggctgtaagtgaaggaaataaaatggagtctgtccggctctctcagctaagagagataatcaggttaaaacaaggtagggtatcaagagatcatgccattgtacttcagcctgggggacaagagcaagactttgtctcaaaaaaaaaaaaaattggtaatatggtgcactgtaagctacagaaagacagttataaagaaagattttatataaggaagaatcttgtatgttaaattcttgttctaaaaggagatgactggttgtttaaagaatggatgtttaggacaagtcagaaagtttgttataagatggtctgtggaaataaagagttgaataattaaaggaaaggcattgccaagattaacactaaagttactttagccaccggatgatgtatttctcccaatcatattgaaagttataaaaatggcctaaacctaaaagtattccctaatggcaagtcaaggggaaaatgtatgtttttctcaaagaaaatgttacttttatattaacgtttctggtaatgtacagcaacatctagtggaggcaaaccagtattacaatccattgggacaactaacaggtgtagaactctgctattataccataaggttgtattaccccactagcagcggtcatcttaatatgaatattctaatcctgtcttcaaaaccttctggtaaaaattatctcttttttgcctaggtgctgcaaacagagccacacgaggacacaccattctttttttttattgtttgtttgtttgatttaagacgaagtctcgctctgtcacccaagctggagtgcagtggtgagatatcggctcactgcaacctccgcctcccaggttgaagcaattctcctgcctcagcctccctagtagatgggattacaggcacgcaacaccaagtctggataatttttgtgtttttattagagatgcggtttcaccatgttggccaggctggtcttgaattcctgacctcaggtgattcacctgcctcggcctcccaaagtgctgggattacaggcataagccactgcacctggcctggacacaccattttttttcaagaactcttagatcaacctcaggaggagccctaactgctgttccccaacatgatggcccttttcagcaggaagtatcttgaaagattcgtcatctgacaccccctaacagcagttaggaatacgtctcctgaggggagaataatataggagttattaagaaattattttaggcatttagagagggtaaaagagttctctcactagaatttttctttaataaaaagcagccccaaagccaattcttttctaacagaaaacagcctgaaaagtcaagctgcaagctgataagcaggctggagactttcatttgtaaatgcaggcggctgtattaaaaggcaagtacatttcaacagaggtgaattcctcctcttttttctttgacaccacttgtgtgggtgtcatggcaccagccaggtaaagccacgtgagcaggtatcatggtgacaggtagaagctacatttgcataataaaagactagggtgggagggccagcctttgcatgggttatgtaaatggcacacctggtcaaccaatctcctgtgccctatgtaaatcaatcactgactcctcaagcttctctacaaaatcaattgtgttctacccgcaaccaggaaattttttaggtgaccctgtttctcagcatgaggagctttctctctctctgttatttttgcctattaaactttctttttttttttttttttttttttttgagacggagtctcactctgtcgcccaggctggagtgcagtggcgccatctcggcccactgccagctctgcctcccgggttcacgccattctcctgcctcagcctcccgagtagctgggactacagacgcccgtcaccacgcccggctaattttttgtatttttagtagagacggggtttcaccgtgttagccaggatagtctcgatctcctgacctcgtgatccacctgcctcggcctcccaaagtgctgggattacaggcgtgttgtctattaaactttccaccccaaaatcaatcctcgtgtgtgttcgtgttctaaattttcctcgtgtgagacaacaaaccccaggtatttaccccagacaatgcagccatttcagagtctgggaaatgaatcttagtcacagaaaaaaagaacagcaatgaacatggcaaggtgcttatgattctggtccactggatcttcctatccctaggaaagtaaataccatcacagtcagcacccagcaagttaccaccatataatttcttgtttgttccaaaataaatacaggtgattcttatcacaaaggcaaataaaaagtagtttactttttaaactgaactgtatcagtttagtttactcttaagttcttataattttgaaaatgcagttgacacttgtatggcttatgaaatttttgatagtctaacattacttgaattgttcaaagaacagtatattttaaattaagaagagtaaactgtatgtgtttgtttcctatatttaaggtttagaatcacaaattacactcctgtttatgatttgaaaacttcaaagtttggtttttccatctgtacatacacagaacagtgttatcgtgctgaaacatttgtatcttaagatggcagtcacagtttccatctgtctggatatattttggacttttgcatgttaaacataagaaagagactttttgttttaggtaatctaagactgttgtacacaaactacagattactgtagggttcagcaaactatgtttataatgtgacattaatatctattttgatgtctaaatcaaaactttttttagaaataattttttttttacaaatatctccacaaattcaggtttattttataaaatggcaggatagtaaagaaataggtggtttgccatagtatatgaatacatgcacttaattaaaataccaaatattataatcaaaatttagatagcagatttaaataatttcttgatttttcactacaggatagaaattcacaaatattttataaatcaaagctattagtattaggttttacttagtagtaatatatatatatattctgggtatttaaaaaatatatatatattctgggtatttgaaaacaccaaattattgatgaaaatgtccattttgaacaaattattgatcatatatatcatacatcatacatacatatcatatatgcaatcatacattatcatatatgtatgatgtataatatatgatcaagaatttgttcaaaatgggtatttttcatcaataatttggtgttttcaaatacccagaagtcttgttttaatcagattaactctaagaatagtttactaattttattttttatggtgtgttcaaaatttgatagtttaatatggattgatgatgggtaaactaatcaatttcttttcaaatctcataggcctattacattgtcaaggatgttattaataaaaattctttcttttaatattgtttacagggatttaggtctagtctaatctgctcaacctgttaatcagtgtcagctgccagattccaactcatttttagtgtgcctatgtgactttttctccatagtctctgaattacattttgattagttattggaatatcatatagcacagctcatacatttaaaacaaaaccaccaggtaaaatgagttctggtttagtataaagaagctgtcaccaagttagtgttacatacatagatggatgtggctcaacaagattttagacaaaaaaatttgaattgaactatggcaacgtgtgttgctatgacttagcctctagtgggcttatgaacaaagacaaatttcagcaaatttatccagttgctttcagtatctctaaagatagtatgtcaagaattctcatgctactgtctgaaaaaacagattcttctcttatctaagaaatcaactggatatatttttataagcttgtgcaagaaaaaactgcaatgcagtactaataattacagacgatataatgtggaaaagaataatctagaatgtcaatttcaatatgtaagtatttaggttgggcatggggactcatgcctgtaatcccagcacttgggaggctgagtcatgtggatcactttaggtctggagttcaaggccagcctggccaacatggtaaaacccatcactactaaaaatacaaaaatcaagcatggtgggaagcacctgtaatcccagctactcaggaggctgaggcaagagaatagcttgaactcaggagacagagattgcagtgaactgagattgaagcaccgcattctagcctgagttacagagtgagattctgcctcaaaaaaaaaaaaaaaaaaaaagtatttaacctttcacttgaaaaatgtgataaaattaagtttttggtaagctttgtgtagcttaacatcagcatagagtagaaaaaaaatctttaaaaatgcaaacaaaaagctacaccaaaaaaactaacatctaccagtgcatacatattgatctttgttttgggagagtctaaagcaaaacatttggtgaacttgatacagttattttgatcacattggcatactgataaaatcattttatttaatttcactgaaacatgttcacatcttaaaaatactgttttgtaacatgaatgataaatgtaaagtctttatcctcaagaggatcctgattctcaagatatatggcaacccgtgtctctggtttctccaaactgaagtttcatgaaggctcaaacatgaagtgagagggagtcaacaacagagcatgagaagcaagaaggatgaggtaggatggtcagctctaaggctcagaggttcctgggggaccccaatataatgatgtcaactatgaagctcactagtaaacataaacataaaaagctgaggctgggcatggtggctcatgcctgtaatcccagcactttgggaggcctaggcaagcggatcacaaggtcaagagatcaagaccatcctggccaacgtggtgaaaccccgtctctactaaaaatacaaaaattagctgggcatggtggcgcacacctctaatcccagctactcaggaggctgaggcacgagaatggcttgaacccgggaggtgaaggttgcagtgagccgagatcacaccactgcattccagcctggtgacagagtgagactccatctcaaaaaaaaaaaaaaaaaaaaaagttgaaaactccatggcttctctttggtgagaaaaagtctctggaattacaaacagtcctgccaaaaggattgagccagaatgacatgtatctaaggattattaaggaggaatgttcataagcacataagtatttgttccaaaacttattacagtagcaatatccttttctgtaattttagcttccccaaggtagggttgctgtagacaaactaagacaaggcactaatatgttgaaggcaattagtttctaaatttaaaaaacttgcaatttttttttttgagatagagtctcgctctgtcacccaggctggagtgtggtggcacaatctcggctcactgcaacctctgtatcccaggttcaagcaagtctcctgcctcagccctccaaatacctgggattacaggtgcctgccaccatgcccagctattttttgcatttttagtagcgacagagtttcaccacgttggccaggccggtctcgaactcctgacctcaggtgatccacccacctcgggctcccaaagggctgggattaccggggtgagccaccacacctggcccaaaaacttgcaataattttataaattttattgaactctgtttcatgtataaatctcacaaaaagacactatccagtagctatttccctgagacttttctgggaatttctgttgcttgatttcaaatcaaccttattagaatcctagtcatttttgaagccctagatgtaataaaagaaagagggcaggaatgaaaccaagtttccccaaacagtcaatgtctaatatattttgttccccaaaatgaccccaaaaaccacacaagctaaaaaacagtgggtttgaaatttaacctacattcaacagtagcagaaaaccatatgtaaaaatcagcaaagtcataacttagaaacattctgttattccagaaaaaataataaaattcttattttggcatttttaaaaaagaaaaaatacactaaatatgacaaaatataccaactcacttatatctttgaaatatgattttctttctcctaagtatttaatataatatttagacaagactttcatgtattatagctaccatgcatgaactaaaatagccttgggggaaataatttttattaataatgaatattgaggctccagaaatgtaaaatgatttatcttggatacacagctagtgacccaaatgaagctcaaatatgtttgatttaaaaattttaattttgccactgttgacaatgttgacataacagctaaatctgagccttagagttgatagttggggaataaatcaagtactattgaggcgggctaggtaatcaagaaagtggctatgtcctggggatgcggcaaccatggtgattgcatgacaactgcagactgccaacacaataagcaccaacatttacattggatttcagctcattcaagaaaagctctctccagcagggaaattcccctgtagagagcacagtttgattttacctgtcctctaactgaccttttactcattgtaatagtaaaaaacactcacgtgtgtggagatttaagatgctaatgagatatgtgacatataaagaaacatgtacaggtactgagtgtgtgtacgaagagaaccacccagaacatggttactagtaacatctctttccacctccttataaataattatgtaagactctcataaatggaatctccttagttccagcctttgctgtatcattctttttttttttttttttttaatttgagatggagtttcgatcttgttgcccaggctggagtgcaatggtgcaatcttggctcaccacaacctccgccacctggattcaagcgattctcctgcctcagcctcccgagtagctgggattacaggtgcctgccacaacaccagctaattttttgtatttttagtagagacagtgttttactacgttggccaggctggtctcaaactcctgacctcaggtgatcttcccacctcagcctcccaaagtgctgggattacaggcgtgagccactgtgcccagcctgaagtattttaaaatggaggttgagagccttgagattaaaggtcagatttgatggtcactccatactcaccactccgatgattctgtattttgttctgatcctggacaagctcccagatgaaatggctgcactgtctggggtaaatacctggggtccattgtctaatgccaggaaaatgtatgacataaacacacaggaggagtgggtttaggagcagaaagtttaatagacaaaaaagaagagagaaagcttcctcatgctgagaaagcaggtcacccagaagagtttctgggtttggggtagaacacgattgattttgtagagaggcttgtggaggcagtgattgatttacatagggcccaggggtttggttgaccaggagtgccatttacatagccagtgaaaacactggctccccaccctagccttttattatgcaaatgcagcttctacctggctgtgaccatgacacctacacacagggtgaaaaggaaaagagggggaagtttccatgttgaaatataactggcttttggtacagctgcctctatttacatatgcaaccctctagcttgcttataagcttgcagtttgactttttaggctactttctgttaggaataaaatggtttgggggctgctttttattaaaggaaaattccagtgagaactcttttacccacttaaactgcctaaaacagtttcttaataaatcctgtattaactcctcttcaacttcatttctattgtggcatgaataattttggactgctttagcatcttcctttaacttctgctaattttctttgactttttattattcttgtccatctctggtggttgctttgctgtaccagtttgagaagttcaggtggtttcaccctcagctgctccagcagtccattcatttggctcaagctcttggacagtttctccccgttcttctgtttgtggcatctgagatttgtcagcagggcgtggttttcaggaaccatggctaccacctcgttccacctgcagggtggctcttgcacttctggtgggtgctgattctacagaaacaacagcagcagccagagcatccacatctggtgtcacccagctcagggacaccctggctgtaaccctgggatgaggtccagctaactgcatagaaatctaaggtcatccagagcatttcccatagctgggtgaaccctcctcagtttgtggagccaggccctcccaccagcttcctgctgcctcctcctctaccatcagagggatgcacaggatgaggaaggagcacggagtcaccatggaagagtccaggggagtgaggatgagctgggacaggcagcctcaggccaagtgcatggtggtgcccctcatacctgagcacaaatcagatcagccactgccactgcagggaggacagagaagcccaggcttcccagccagcctccctctgcaccagtagagatgaaaactattttttttttttttttttttttttttttttttttttttttgagacggagtctcgctctgtcgcccaggctggagtgcagtggcgggatctcggctcactgcaagctccgcctcccgggttcacgccattctcctgcctcagcctcccaagtagctgggactacaggcgcccgccactacgcccggctaattttttgtatttttagtagagacggggtttcaccggaaaactatttcttaaacaaaagtatggagtagaacttgcatatctgacccaatcacattttcattctctttttctttttgttttgctttttcctcttagattgtgctctcctgaagtcagattgggataggaggtttataggaaacttcagaagtatccacttatcaggagtgtgtaaggcgtttatgtagttagacttcaagtttcatgagagtagagaccaaaactttcctttctctattttattttctaaggctaccaaaaggatggcatatcatgtgtgctccacatacatttattggttaaaagaatgaatacatattctttgtaaactgtgaaactatgcaaatcaagcctttattatttttattttctatagtttagttaataaaatcaaatagaaaataatgaagtgtagaatgcagaaagcactatcgaaagtttaatgttgctctccctattcctattcctatccctatccctatccctatccctatccctatccctatccctatccctctccacggtctccctctgatgccgagccgaagctggactgtactgctgccatttctgctcactgcaacctccctgcctgattctcctgcctcaacctgccgagtgcctgcgattgcaggcgtgcgctgccacgcctgactggttttcatatttttttggtggagacggggtttcgctgtgttgtccgggctggtctccagctcctaactgggagtgatctgccagcctcggcctcccgaggtgccgggattgcagtcggagtctcattcactcagtgctcaatggtgcccaggctggagtgcagtggcgtgatctcggctcgctacaacctccacctcccagccgcctgccttggcctcccaaagtgccgagattgcagcctctgcccagccgccaccccatctgggaagtgaggagcgtctctgcctggccgcccatcgtctgggatgtgaggagcccctctgcccagctgcccagtctgggaagtgaggagcgcctcttcccggccgccatcccgtctaggaagtgaggagcgtctctgcccggccgccccgtctgagaagtgaggagcccctccgcccggcagccgccccgtctgggaagtgaggagcgtctccgcctggcagccgccccgtccgggaggtggggggtcagcccctgccctgccagccgccccgtccgggagggaggttgggggggccagcccctggccggccagccgccccgtccgggaggtgggggggcgcctctgcctggccgccccttctgggaagtgaggtgcccctctgcccggccgccaccccatctgggaggtgtacccaacagctcattgagaacgggccatgatgacgatggcggttttgtcgaatagaaaagggggaaatgtggggaaaagattgagaaatcagattgttgctgtgtctgtgtggaaagaagtagacataggagactccattttgttctgtactaagaaaaattcttctgccttgggatcctgttgatctatgaccttacccccaaccctgtgctctctgaaacatgtgctgtgtccactcagggttaaatggattaagggcggtgcaagatgtgctttgttaaacagatgcttgaaggcagcatgctcgttaagagtcatcaccactccctaatctcaagtacccagggacacaaacactgcggaaggccccagggccctctgcctaggaaaaccagagacctttgttcacatgtttatctgctgaccttccctccactattgtcctatgaccctgccaaatcctcctctctgagaaacacccaagaatgatcaataaaaaaactaaataaataaaaatttaaaaaaaaagaaagtttaatgttaacccagcacacatgggtaaaatacattttttttttttttcagacggagtttcactcttgttgccttggctggagtgcaatggtgcgatgtgggctcaccgcaacctcacctcccgggttcaagcgatttttcctgcctcagcctcctgagtagctgggattacaggcatgcgccaccatgcccagctaattttgtagttttagtagaaacggtgttgccccatgttggtcaggctggtctcgaactcctgacctcaggtgatccacctgcctcggcctcccaaagtgctgggattataggcgtgagccacctggcccggccattaaaatttttagtttctaaatttgggaccattataattacatttaaattgccacatgaggatggaacatgaaacctgacttcaggagagcacaatttaaggggaaatggcaaaaaaaaaaaaaaaaaaagaaagaaaaagaaaaatgaaaatttgattcggtcagatccgcaagttctcctccatactttttgtttttttagaaaataattctttcctctgctggtgcagagtgaggctagctgggggagcctgggccccactgtcctcccggaggtggcagtggccgatttctgctcaggcatgaggggcgccgccatgtcctgggcctgaggctgcccagcccagcccctcctcactcctttggactcttccacggtgtctccaggcccctgcaccatcctgtgtaactctctgatgaaaggcgaggtggcagcatgaagatgatgggggaactgccccgcatgccaaggaaagctcgcccagctgcacaaaatgctctggttgacatcgggtttctgcgcaccaagctgcgccatgaccaagggttagagccgaggcgtccaccggctgggccaccccggacgtgggcgctccatctgctcctgcggttcctgctgtgcttggctaagccgtggctggaaccggcgcccgccagaagtgcaggagccgccctgccggcagaaagagggcatggtcgctgaaaaccaggccctgctgacaaatctcagacgccaggaacagaagaaccacaaaaatggacggaccgttggaacacctgagggtgaagttgtgcgaactcctcaaagtggaacagcaaagcagccaccagagatggactagaaagatgaaaaattagcagaaatcaaaggcagatgctaaagcagtgcaaaaccgttcacacaacgatagagacggaattgatgaagaagtttgagaaatgaatgacagaaagaaaggacagcagtgaccatggtaaggtgctgacgattctggtccactggatcccatcatccctagggcagtaaatctcatcacagtcaccactcagcaagttaccaccgcagcatttcctgtttgttccaaaatgaataaaagtgattctcatcacaagggcaaatacagagtagtttattattattatttttaactaaactgtagcggtttagttt
